(19) United States
(12) Patent Application Publication
(10) Pub. No.: US 2023/0114119 A1
(43) Pub. Date: Apr. 13, 2023

(54) COMPOSITIONS AND METHODS COMPRISING IMPROVED GUIDE RNAs

(71) Applicant: Cornell University, Ithaca, NY (US)

(72) Inventor: Joseph E. PETERS, Ithaca, NY (US)

(21) Appl. No.: 17/906,134

(22) PCT Filed: Mar. 16, 2021
(86) PCT No.: PCT/US2021/022582

§ 371 Date: Sep. 12, 2022

Related U.S. Application Data
(60) Provisional application No. 63/047,209, filed on Jul. 1, 2020.
(60) Provisional application No. 62/990,111, filed on Mar. 16, 2020.

(51) Int. Cl. C12N 15/113; C12N 15/10

(52) U.S. Cl. CPC C12N 15/113; C12N 15/1089; C12N 2310/20

(57) ABSTRACT

Provided are compositions, methods, systems, and kits, for use in CRISPR-based DNA editing. The compositions include RNA polynucleotides that include one or more atypical repeats, and can include truncated spacers. The RNA polynucleotides are used with proteins in systems that include CRISPR and transposon genes, or proteins encoded by the genes. The genes include transposon genes tnsA, tnsB, tnsC, and tniQ, and Cas genes cas8f, cas5f, cas7f, and cas6f. Use of the RNA polynucleotides as guide RNAs that include atypical repeats with the transposon and CRISPR proteins exhibit enhanced transposition, relative to guide RNAs that do not include atypical repeats. Enhanced transposition is demonstrated using representative IF-3b systems.

### CROSS-REFERENCE TO RELATED APPLICATIONS

[0001] This application claims priority to U.S. provisional application No. 62/990,111, filed Mar. 16, 2020, and U.S. provisional application No. 63/047,209, filed Jul. 1, 2020, the entire disclosures of each of which are incorporated herein by reference.

### STATEMENT REGARDING FEDERALLY FUNDED RESEARCH OR DEVELOPMENT

[0002] This invention was made with government support under grant number R01GM129118 awarded by National Institutes of Health. The government has certain rights in the invention.

### SEQUENCE LISTING

[0003] The instant application contains a Sequence Listing which has been submitted electronically in ASCII format and is hereby incorporated by reference in its entirety. Said ASCII copy, created on Mar. 12, 2021, is named 018617_01284_SL.txt and is 2,176,959 bytes in size.

### FIELD

[0004] The present disclosure relates generally to approaches for modifying DNA, and more particularly, to improved compositions and methods for CRISPR-based editing, using guide RNAs with sequences that include atypical repeat sequences. The guide RNAs may also or alternatively comprise and shortened spacers.

### BACKGROUND

[0005] A wide variety of clustered regularly interspaced short palindromic repeats (CRISPR) arrays have been investigated over the past several years. CRISPR arrays typically comprise an AT-rich leader sequence followed by short repeats that are separated by spacers which each comprise distinct sequences. CRISPR repeats typically span lengths of 28 to 37 base pairs, although shorter and longer sequences have been reported.

[0006] RNA polynucleotides transcribed from CRISPR arrays are processed by a variety of mechanisms in order to facilitate RNA-guided editing of polynucleotides using so-called guide RNAs, commonly referred to as gRNAs. The adoption of numerous CRISPR-based RNA guided DNA editing systems and techniques has recently proliferated dramatically, in accordance with increased knowledge and resources that permit rational design of guide RNAs for targeting virtually and DNA sequence in any cell type. However, there remains an ongoing and unmet need for improved compositions and methods to enhance these approaches. The present disclosure is pertinent to this need.

### SUMMARY OF THE DISCLOSURE

[0007] The present disclosure provides compositions, methods, systems, and kits, for use in CRISPR-based DNA editing. The disclosure demonstrates that certain CRISPR systems which use privatized guide RNAs exhibit enhanced transposition efficiency. The enhanced transposition efficiency supports use of the described systems to insert cargo DNA at a predetermined location in a DNA substrate, such as a chromosome or plasmid.

[0008] The privatized guide RNAs comprise one or more atypical repeat sequences, as further described herein, and may also include truncated spacers. The atypical repeats are, in certain embodiments, derived from one or more repeats that are next to a spacer in a CRISPR array that was not the most recently acquired spacer in the array.

[0009] In an embodiment, the disclosure provides an RNA polynucleotide (e.g., a guide RNA, also referred to as a “gRNA”) for use in a CRISPR system that in certain examples is a Type I-F3b CRISPR system.

[0010] In embodiments, the RNA polynucleotide comprise contiguously in a 5′ to 3′ direction: i) a 5′ end segment comprising a first CRISPR repeat sequence; ii) a spacer sequence that comprises a targeting sequence that is complementary to a protospacer (e.g., a target sequence) in a DNA target; and iii) a 3′ end segment comprising a second CRISPR repeat sequence. The 5′ end segment, the 3′ end segment, or both, comprise one or more nucleotide changes relative to a first reference repeat sequence, or a second reference repeat sequence, respectively, or a combination of such nucleotide changes. In embodiments, the RNA polynucleotide is functional with a Type IF-3b CRISPR system and exhibits more efficient modification of DNA templates comprising the protospacer than an RNA polynucleotide used as a guide RNA in the Type IF-3b CRISPR system, but wherein the guide RNA does not comprise the one or more nucleotide changes, e.g., the guide RNA does not contain an atypical repeat. In embodiments, the guide RNA includes a 5′ end segment that comprises or consists of 8 nucleotides. In embodiments, the guide RNA includes a 3′ end segment that comprises or consists of 20 nucleotides, and optionally, the 3′ end of the 20 nucleotides is a G. In embodiments, the 3′ end segment of the guide RNA forms a stem loop that comprises palindromic sequences.

[0011] In non-limiting examples, an RNA polynucleotide of the disclosure includes, as a reference sequence, a first repeat reference sequence that is encoded by a first occurring repeat sequence that is 3′ to a Cas6 coding sequence in an endogenous prokaryotic CRISPR array. In embodiments, a second reference repeat sequence is encoded by a second occurring repeat sequence that is 3′ to the Cas6 coding sequence in the endogenous prokaryotic CRISPR array. In embodiments, the first and/or second reference repeat sequence is the same as a repeat sequence present in a bacterium or archaea, wherein the repeat sequence in the bacterium or archaea is contiguous with a spacer in a CRISPR array that is not the most recently acquired spacer acquired by the bacterium, e.g., the 3′ end of the first repeat is next to the 5′ end of a spacer that was not the most recent spacer that was inserted into the array. Likewise, the 3′ end of the spacer is next to the 5′ nucleotide of the second repeat in the described repeat-spacer-repeat segment. In embodiments, the endogenous prokaryotic CRISPR array is may be a gammaproteobacteria CRISPR array. In a non-limiting embodiment, the reference repeats, and/or the atypical repeats, may be obtained from an A. salmonicida CRISPR array.

[0012] The disclosure includes the described RNA polynucleotides that are provided as a component of a ribonucleoprotein (RNP) complex. In embodiments, the RNP comprises a described guide RNA and proteins that are selected Cas5, Cas6, Cas7, Cas8, and combinations thereof. In an embodiment, the RNP comprises the Cas6, and a stem loop comprising at least a portion of the 3′ end segment of an atypical repeat is recognized by the Cas6 in the RNP. In embodiments, the targeting sequence of the guide RNA is selected for inclusion in the RNA polynucleotide that is processed into a guide RNA, such that the RNA polynucleotide is suitable for use in CRISPR-based modification of a known DNA target sequence comprising a protospacer. In embodiments, the targeting sequence (e.g., the spacer) in the guide RNA may be completely identical to the protospacer, or certain mismatches between the spacer and the protospacer may be included. In certain embodiments, the spacer is not more than 29 nucleotides in length, and thus may constitute a truncated spacer. In embodiments, an RNA polynucleotide of the disclosure comprises only one repeat-spacer-sequence, or more than one repeat-spacer-repeat sequence, wherein at least one of the repeat sequences is an atypical repeat. In embodiments, the spacer in a described repeat-spacer-repeat sequence may, where there is more than one repeat-spacer-repeat segment in the RNA polynucleotide, be the same spacer sequence, or different spacer sequences may be used.

[0013] The disclosure includes expression vectors encoding all of the RNA polynucleotides described herein, including but not limited to all atypical repeats, and all combinations of atypical repeats. Isolated RNA polynucleotide transcribed from such an expression vector are also included, as are cells, including eukaryotic and prokaryotic cells, that include the expression vectors.

[0014] In one aspect, the disclosure provides a system for modifying a genetic target in one or more cells. The system includes the described RNA polynucleotides, or one or more vectors encoding them, and also includes a first set of transposon genes tnsA, tnsB, tnsC, and tniQ, Cas genes cas8f, cas5f cas7f and cas6f and optionally an xre gene encoding a transcription regulator, or optionally one or more proteins encoded by one or more of said genes. In embodiments, at least two of the described proteins may be present in a fusion protein.

[0015] The system also includes a DNA cargo that can be introduced into DNA in a location that is proximal to the protospacer in a DNA target. In non-limiting embodiments, genes, or proteins encoded by the genes, that are used in the described systems, optionally comprise one or more amino acid changes, relative to a reference sequence. In embodiments, the amino acid changes can be in the tnsA gene, the tnsB gene, the tnsC gene, or other genes and proteins described herein as components of the system.

[0016] In an aspect, the disclosure includes a method that comprises introducing or expressing a described system in cells. In embodiments, the methods are suitable for modifying prokaryotic or eukaryotic cells. In embodiments, the targeting sequence in the RNA polynucleotide that comprises a described guide RNA is targeted to a protospacer in a chromosome or a plasmid in the cells. The described method includes introducing a cargo DNA into the cells. The cargo DNA is inserted into the chromosome or plasmid in a position that is proximal to the protospacer. In embodiments, the DNA cargo is inserted into the chromosome or the plasmid at a position that is 48 nucleotides from an end of the protospacer. In certain embodiments, the DNA cargo comprises transposon left and right ends.

[0017] In another aspect, the disclosure provides a method comprising analyzing CRISPR arrays from a plurality of organisms, determining repeat sequences flanking spacers in the CRISPR arrays, comparing repeat sequences flanking earlier acquired spacers to repeat sequences flanking later acquired spacers, determining differences between repeat sequences flanking the earlier and later acquired spacers, and designating the repeat sequences flanking the earlier acquired spacers that are different from the repeat sequences flanking the later acquired spacers as candidates for use in designing a guide RNA for use in CRISPR-based DNA modification. In embodiments, the disclosure includes producing an RNA polynucleotide that includes sequences identified using the described method. The disclosure further comprises using the RNA polynucleotides identified using the described method in CRISPR-based DNA modifications, which may include insertion of a cargo DNA into a chromosome or plasmid. Thus, in embodiments, the disclosure includes providing, and using, RNA polynucleotides that contain a substitution of a spacer or a repeat, or a combination thereof, in analyzed CRISPR arrays with a different spacer and/or repeat sequence. In embodiments, the spacer is optionally not longer than 29 nucleotides in length. The disclosure includes libraries comprising RNA polynucleotides identified and produced according to the described method, wherein the RNA polynucleotides include a spacer that is targeted to a segment of DNA. The spacer sequence may be designed by a user of the system.

[0018] The disclosure also include a database comprising a plurality of entries comprising sequences identified by the described method. The disclosure further comprises selecting a sequence from the described database, and producing an expression vector and/or an RNA polynucleotide that comprises an identified sequence.

[0019] In another aspect, the disclosure includes a kit for producing an expression vector for use in CRISPR-based DNA modification. The includes an expression vector comprising one or more restriction endonuclease recognition sites configured for cloning a desired spacer such that the spacer is contiguous with one or more repeat sequences identified according to the method of claim, or other atypical repeat sequences as described further herein. The kit may also include expression vectors that comprise some or all of tnsA, tnsB, tnsC, and tniQ genes, Cas genes cas8f, cas5f cas7f, and cas6f and optionally an xre gene, or one or more proteins encoded by one or more of these genes.

### BRIEF DESCRIPTION OF THE FIGURES

[0020] FIG. 1. Tn7-like elements with I—F3 CRISPR-Cas systems found in gamma proteobacteria. A TnsA protein similarity tree representing 802 elements indicated by host strain. Elements that were >90 percent identical are indicated with a single representative. A similarity score was calculated for repeats and indicated in shades of black (high) to grey (low). Spacers are indicated with rectangles (shorter rectangles indicate truncated spacers).

[0021] FIG. 2. Selected representatives from four att-site families of Tn7-like elements with I—F3 CRISPR-Cas systems. Representatives for three major families (att sites; yciA, guaC, andffs) and one minor family (rsmJ) are indicated by host. (A) Transposition genes (tnsA, tnsB, tnsC, and tniQ/tnsD), Cas genes cas6, cas7, and cas8/5, and regulator xre are indicated. CRISPR arrays indicated as in FIG. 1. The left (L) and Right (R) ends of the elements are indicated and putative Xre binding sites (asterisks). (B) Matches between the guide RNA and protospacer are shown on each gene (block arrow) with the right end of the element (grey box) and host indicated. Distance from the protospacer to the target site duplication (TSD, grey and bracketed) is shown. FIG. 2B discloses SEQ ID NOS: 5731-5741, respectively, in order of appearance. (C) CRISPR array is indicated with the leader region and spacer (S #) and repeats (R #) indicated showing the sequence of the repeats. Sequence differences from the first repeat (red), noting changes maintaining the stem (light blue) and the inverted repeats that makes the stem (boxed) are indicated. The size of the gap in the array is indicated noting the putative Xre regulatory site. FIG. 2C discloses SEQ ID NOS: 4762, 4762-4766, 374-376, 3021, 3021-3024 and 1286-1289, respectively, in order of columns.

[0022] FIG. 3. I-F3b Tn6900 element derived from A. salmonicida S44 allows RNA-guided transposition with typical and atypical repeats. Various transposition targets were tested using the A. salmonicida S44 native array or as individual repeat-spacer-repeat units. (A) Simplified representation of transposition/CRISPR-associated genes, CRISPR array (marked as in FIG. 1) and the resulting typical and atypical guide RNAs with the 5′ and 3′ handles indicated. Position of Cas6 processing is indicated (scissors). FIG. 5A discloses SEQ ID NOS: 5742-5744, respectively, in order of appearance. (B) Frequency of transposition found with the native A. salmonicida S44 array with targets constructed into an F plasmid; A. salmonicida S44 plasmid pS44-1 (pS44-1), chromosomal ffs att site (ffs) or a negative control, lacZ gene. (lacZ) (C-E) Transposition frequency found with a single repeat-spacer-repeat unit in various combinations of spacers with typical or atypical repeats from Tn6900 with the indicated targets constructed into an F plasmid. All data indicate mean+/−standard deviation (n=3).

[0023] FIG. 4. Analysis of atypical repeat sequences in Tn7-CRISPR-Cas elements, Tn6677 and Tn6900. (A) Consensus sequence of the typical and atypical repeats as a function of position in the array. Symbols are as in previous figures with the stem-loop indicated (top, n=85 for I-F3a, n=74 for I-F3b), (middle, n=51 for I-F3a, n=41 for I-F3b) or (bottom, n=51 for I-F3a, n=41 for I-F3b). (B-D) Frequency of transposition found with changes in typical and atypical guide RNAs for Tn6900 (B) or Tn6677 (C and D) with the indicated spacers and their associated targets. FIG. 4B discloses SEQ ID NOS: 5743, 5745-5746 and 5744, respectively, in order of appearance. FIG. 4D discloses SEQ ID NOS: 5747-5750, respectively, in order of appearance. Typical guide RNA were tested, comparing with naturally-occurring changes from atypical repeats (red) or engineered mutations (underlined). All data indicate mean+/−standard deviation (n=3).

[0024] FIG. 5. P. aeruginosa type I-F1 Cascade can utilize heterologous I—F3 CRISPR arrays in a plasmid interference assay, but mismatches and I-F3b atypical guide RNAs allow privatization. Expression of P. aeruginosa Cas proteins with various arrays reduces transformation efficiency for protospacer containing plasmid, but not control. Single unit arrays from P. aeruginosa PA14 and A. salmonicida S44 Tn6900 with ffs spacer, and V. cholerae HE-45 Tn6677 with guaC spacer were tested in typical and atypical repeat configurations as indicated. Spacers were either perfectly matched to protospacer or contained native mismatches. Repeat configuration sequences are presented in FIG. 10B. All data indicate mean+/−standard deviation (n=3).

[0025] FIG. 6. Xre proteins regulate components of RNA-guided transposition. (A-B) Consensus sequence for putative Xre binding motifs in I-F3a and I-Fb elements. (C-D) Xre-binding resolved by EMSA. DNA fragments with the transcription control regions were incubated with increasing amounts of Xre protein from the respective element before electrophoresis (100 nM DNA; protein:DNA ratios=0, 2, 5, 10, 20:1). (E-F) Promoter function resolved by LacZ expression monitored by Miller units at various arabinose controlled Xre expression levels. Transcription control regions are indicated from V. cholerae HE-45 Tn6677 (Vc), V. parahaemolyticus RIMD221063 (Vp). A. salmonicida S44 Tn6900 (As), and Vibrio sp. 10N.286.45.B6 (VB6).

[0026] FIG. 7. Xre regulation program allows zygotic induction of transposition function promoters in a new host after conjugal transfer. Transfer of lacZ fused to Xre transcriptional control regions results in a burst of expression in a naïve recipient strain, but not recipients expressing the Xre regulator protein. Donor and recipient were plated together for mating (solid lines) or plated separately (dashed lines) as a control. Cells were harvested and controls mixed and LacZ expression monitored by Miller units as indicated. All data indicate mean+/−standard deviation (n=3).

[0027] FIG. 8. Aeromonas element features and transposition. (a) Schematic representation of two nearly-identical I-F3b Tn7-CRISPR-Cas elements found in different bacterial species suggesting recent activity. Core features are indicated as in FIG. 2a. Elements are located either in the chromosomal ffs site in A. hydrophila AFG_SD03 or inserted into a phosphoadenosine phosphosulfate reductase gene (cysH) found on a large conjugal plasmid (pS44-1) in A. salmonicida S44. The A. hydrophila element is split across several contigs interrupted by apparent IS element insertions. (b) Spacers in the leader-proximal position of A. salmonicida S44 and A. hydrophila AFG_SD03 CRISPR arrays match protospacers in a plasmid encoded cysH. Relative position of the protospacers are indicated. Distance from the edge of the protospacer matching A. salmonicida S44 spacer to the central position in the target site duplication (TSD), the 5 bp TSD (underlined), as well as the terminal sequence of the transposon ends are shown. FIG. 8B discloses SEQ ID NOS: 5751-5752, respectively, in order of appearance. (c) Repeats and spacers from Tn7-like CRISPR arrays in A. salmonicida S44 and A. hydrophila AFG_SD03. Repeats are annotated as in FIG. 2c. Differences from the first repeat are indicated in red. Matches between the guide RNA and protospacer are indicated by a short vertical line. The putative I-F PAM is underlined. FIG. 8C discloses SEQ ID NOS: 5802-5803, 5753, 5754, 5804, 5755-5758, 777-781, 5759, 5760, 5757, and 5805, respectively, in order of columns. (d) Protospacers on the chromosome or F plasmid are targeted at high efficiency with atypical guide RNA complexes. The same three lacZ guide RNA complexes were tested with either the F::/acZ plasmid or chromosome (lacZ in its native position) and insertion events were indicated by generating white versus red colonies on MacConkey's lactose indicator media. Graph shows the mean+/−standard deviation of three biological replicates and number of white colonies and total colonies observed. (e) Different genes on the chromosome can be targeted for atypical guide RNA-directed transposition in the E. coli chromosome. Two genes where tested with two spacers each (top and bottom strand) for galactose (galK) and sorbitol (srlD). Transposition frequency was assayed by monitoring gene inactivation leading to loss of sugar catabolism as visualized by white versus red colonies on the appropriate MacConkey's indicator media. Graph shows the mean+/−standard deviation of three biological replicates.

[0028] FIG. 9. Assaying full transposition frequency and position. (a) Mate out assay schematic. Target DNAs with the appropriate protospacer are recombined onto an F plasmid and transposition genes and arrays are supplied on expression vectors to mobilize a mini-Tn donor element located in the chromosome (Methods). After induction, transposition frequency is determined by mating out the population of F plasmids into a donor strain and quantifying antibiotic marker presence in transconjugants as shown. (b) Transposition position and orientation in transconjugants are determined by PCR. An internal primer and two primers flanking the target site capture orientation of insertion. For Tn6900, pS44-1-targeted insertions were monitored; for Tn6677, guaC^{Vc}-targeted insertions were monitored. *For Tn6900 typical array insertion isolates 12, 13, and 14, the first PCR reaction failed and was repeated with the same template strain. (c) Transposition position and target site duplication are confirmed by Sanger sequencing for Tn6900 transposition. Arrows indicate position of the central base of the target site duplication for isolated transposition events targeting pS44-1, with distance from protospacer to the central position of the target site duplication listed for eight transposition events, confirming previously described target site wobble. Graph shows one representative of the actual target site duplication (TSD). FIG. 9C discloses SEQ ID NOS: 5759, 5761-5765, and 5763, respectively, in order of appearance.

[0029] FIG. 10. Interference assay repeat sequences. Repeat sequences used in interference assays (SEQ ID NOS: 5766-5770, respectively, in order of appearance). Differences from P. aeruginosa repeats are indicated in grey. The box indicates the previously established conserved region that comprises the putative stem-loop in I-F repeats. N32 indicates the position encoded in the spacer.

[0030] FIG. 11. I—F3 Xre cluster into two clades with restriction-modification C proteins. (a) Similarity tree of Xre (midpoint rooted) with associated C proteins C.AhdI and C.Csp231I (marked in teal and fuchsia), indicating clustering in the two branches. Features are indicated as in FIG. 1. (b) Predicted regulator sequences for Xre and associated C proteins. Conserved inverted motif sequences are indicated by bold text and black arrows. The start codon of the downstream gene is underlined, except for pAttGuide sequences, where the first three bases of the att-targeting spacer are underlined. FIG. 11B discloses SEQ ID NOS: 5792-5801, respectively, in order of appearance.

[0031] FIG. 12. Comparing spacers and protospacers in relation to reading frame. The four major att-site targeting spacers are compared to the protospacer (target) in each host; ffs, guaC, yciA, and rsmJ. The percentage of mismatches is indicated by position in the spacer comparing unique spacer-protospacer combinations (related to a diagram of the guide RNA showing the predicted flipped-out 6th position in red). The amino acid sequence is indicated to relate to the coding sequence (Note that ffs is functional as an RNA and the yciA gene is encoded on the opposite strand of guaC and rsmJ). The consensus sequence for the unique spacers and protospacers are indicated as Weblogos. The total number of mismatches per spacer-protospacer is indicated excluding the 6^{th} position which is flipped-out in the cascade complex in I-F systems. The number included in the tabulations is indicated (n). FIG. 12 discloses SEQ ID NOS: 5771-5773, respectively, in order of appearance.

[0032] FIG. 13. Elements with shortened spacers and their insertion positions. (a) ffs-integrated elements (SEQ ID NOS: 5737, 5738, 5774-5780, 5778, 5781, and 5780, respectively, in order of appearance), (b) araC-like integrated elements (SEQ ID NOS: 5782-5785, 5782-5784, 5786-5788, 5784, 5789, 5787, 5790, 5784, and 5791, respectively, in order of appearance). Features are indicated as in FIG. 2b. Arrays are shown for each element, with repeat sequences marked in dark grey, spacers marked in light grey, and conserved Cas6 binding motifs are underlined.

[0033] FIG. 14. Schematic representation of elements inserted downstream of pare. Similarity tree of TniQ proteins indicates that Parashewanella curva C51 has representatives that group with elements that target the parE att site and elements that use the I—F3 CRISPR-Cas system. In cases where two TniQs are found in the element, the one used for the similarity tree is indicated with highlighting.

[0034] FIG. 15. Cartoon depicting enzymes in association with a processed guide RNA (top) and illustrative upstream and downstream repeat sequences, a matched spacer, 3′ and 5′ handles segments of a repeat, spacer, repeat segment of a CRISPR array. A graphical depiction of nucleotides is included. A generic Type I system is shown. The S proteins are Small Subunit proteins, which are not present in IF-3 systems. In I—F3 systems, the Cas8 and Cas5 proteins are present in a fusion protein.

[0035] FIG. 16. Graphical depiction of transposition efficiency as determined using a mate out assay using the experimental approach as described in FIGS. 3B and 9A with the F plasmid lacZ target with a single guide RNA, lacZ4 spacer (see also, FIG. 3E). Guide RNAs contained atypical repeats from A. salmonicida S44. The 854GC construct contains a fusion of TnsA and TnsB proteins, with a deletion of HG at the C terminus of the TnsA protein, and an insertion of an A at the deletion site. The TnsA-TnsB 855GC contains a fusion of TnsA and TnsB proteins, with a deletion of HG at the C terminus of the TnsA protein, and an insertion of an R at the deletion site. The K. ocytoca linker construct contains a fusion of TnsA-TnsB proteins, separated by insertion of an 8 amino acid linker from K. ocytoca, as described below. The NLS-Strep construct contains a fusion of TnsA-TnsB in which the two protein segments are separated by, in a contiguous sequence in an N—C terminal direction, a GSG linker, a nuclear localization signal, a Strep affinity tag, and another GSG linker. The TnsABC vector expresses unfused TnsA and TnsB and TnsC proteins as a control. All of the experiments included the TniQ and Cascade proteins, which are further described herein. The data demonstrate that removal of certain amino acids (i.e., the HG), addition of amino acids (e.g., A and R), addition of a tag (e.g., the Strep tag) and addition of linkers (e.g., GSG and the K. ocytoca linker) are tolerated, and the described systems retain their transposition function.

### DETAILED DESCRIPTION

[0036] The present disclosure provides compositions and methods that relate to CRISPR systems for use in DNA modification. In particular, the disclosure provides guide RNAs (gRNAs) and expression vectors encoding the gRNAs, wherein the gRNAs comprise atypical repeat sequences (e.g. sequences that are RNA equivalents of atypical repeat sequences, such as those found in CRISPR arrays), as further described below. The gRNAs may also include truncated spacers. The gRNAs cooperate with proteins to form systems for use in enhanced DNA editing.

[0037] Unless defined otherwise herein, all technical and scientific terms used in this disclosure have the same meaning as commonly understood by one of ordinary skill in the art to which this disclosure pertains.

[0038] Every numerical range given throughout this specification includes its upper and lower values, as well as every narrower numerical range that falls within it, as if such narrower numerical ranges were all expressly written herein.

[0039] The disclosure includes all polynucleotide and amino acid sequences described herein. Each RNA sequence includes its DNA equivalent, and each DNA sequence includes its RNA equivalent. Complementary and anti-parallel polynucleotide sequences are included. Every DNA and RNA sequence encoding polypeptides disclosed herein is encompassed by this disclosure. Amino acids of all protein sequences and all polynucleotide sequences encoding them are also included, including but not limited to sequences included by way of sequence alignments. Sequences of from 80.00%-99.99% identical to any sequence (amino acids and nucleotide sequences) of this disclosure are included.

[0040] The disclosure includes all polynucleotide and all amino acid sequences that are identified herein by way of a database entry. Such sequences are incorporated herein as they exist in the database on the filing date of this application or patent. Unprocessed (e.g., RNAs that are not trimmed by described CRISPR proteins) and processed RNA polynucleotides (e.g., RNAs that are trimmed by the described CRISPR proteins) are included in this disclosure. The disclosure includes all of the sequences presented the sequence listing and figures, longer sequences comprising each of those sequences, e.g., sequences that comprise or consist of the described sequences with additional sequences at the 5′ and 3′ ends, and all contiguous segments of the described sequences. In embodiments, the described gRNA sequences are 28 to 37 nucleotides long, including but not limited to all atypical repeat sequences and spacer sequences, including but not limited to truncated spacer sequences. In embodiments, the gRNAs may comprise a spacer that is 29 nucleotides in length. Combinations of distinct sequences and segments thereof are included in this disclosure. RNA equivalents (e.g., replacement of T with U) for each sequence is also included, as are gRNAs that comprise such RNA equivalents, regardless of any additional sequences, including spacers. Expression vectors encoding any one or combination of repeat sequences described herein, are included. cDNA sequences of the sequences are included. Where a gene is described, the disclosure includes the protein encoded by the gene.

[0041] Any RNA polynucleotide of this disclosure may be initially transcribed as a guide RNA precursor, including but not limited to a crRNA, and may be transcribed from a DNA template that includes only one repeat-spacer-segment, or more than one repeat-spacer-segment, the latter of which includes but is not limited to all or a portion of CRISPR array, e.g., a segment of DNA that encodes more than one repeat-spacer-repeat segment. The disclosure also includes hybrid arrays, wherein at least one or some repeat sequences comprise atypical repeats as discussed below, whereas other repeats may be the same as one or more reference repeats, as also discussed below.

[0042] It is expected that guide RNAs (referred to from time to time as “gRNAs”) of this disclosure may be suitable for use in a number of CRISPR systems. The gRNAs of this disclosure include but are not limited to sequences that are expressly described herein by way of complete sequences that are the RNA equivalent of DNA repeat sequences, or such sequences that may vary in nucleotide position at certain positions as described herein. The disclosure also includes gRNAs and uses thereof that include gRNA that can be made according to methods described herein.

[0043] In embodiments, gRNAs of this disclosure may function with any of the Class 1 or 2 CRISPR systems. In embodiments, gRNAs of this disclosure are used with CRISPR systems, e.g., CRISPR systems initially found in bacteria or archaea, that include transposon proteins. In embodiments, the gRNAs of this disclosure are used with type I-F or Type I-B CRISPR-Cas systems. In embodiments, the disclosure provides gRNAs for use in CRISPR systems that are associated with Tn7-like transposons. In particular, bacterial genomes shows that many Tn7-like transposons contain ‘minimal’ type I-F CRISPR-Cas systems that contain of fused cas8f and cas5f, cas7f and cas6f genes, and a short CRISPR array. In embodiments, gRNAs of this disclosure are used with I-F CRISPR/Cas elements. Such systems, along with additional components described herein, provide for representative uses of the gRNAs that are at least one aspect of this disclosure.

[0044] Regardless of the type of CRISPR system used, recent analysis of CRISPR-facilitated genetic editing, including but not limited to insertions, indicates all insertions can be explained by guide RNAs. Further, families of conserved insertion sites that are found in chromosomes and originate from certain CRISPR systems used multiple times include attachment sites, abbreviated “att” sites.

[0045] In embodiments, the guide RNAs include repeat sequences that are the RNA equivalents of segments of repeat sequences identified in certain CRISPR arrays as having mutations, relative to other repeats in the same arrays, and such repeat sequences are referred to herein as from time to time as “atypical.” “RNA” equivalent as used herein means the RNA polynucleotide has the same sequence and same orientation as a described DNA sequence, except for the conventional substitution of uracil for thymine in the RNA polynucleotide.

[0046] Without intending to be bound by any particular theory, it has previously been considered that “older” repeats, e.g., those that flank less recently acquired spacers, have mutations that impede the function of guide RNAs that include the repeats and less recently acquired spacer sequences. However, as revealed in the present disclosure, it is considered that gRNAs comprising atypical repeats (which may or may not flank truncated spacers) may be preferentially complexed and processed by certain Cas enzymes, such as Cas5 and Cas6, which recognize 5′ and 3′ repeats (relative to a 5′->3′ oriented, intervening spacer) make more active guide RNA-Cas protein complexes. Alternatively, or additionally, the resulting guide RNA Cas protein complexes have enhanced activities that are not found in complexes made with the typical repeats.

[0047] In embodiments, the disclosure provides RNA polynucleotides (e.g., gRNAs) for use in CRISPR-based modification of DNA, as further described herein. In embodiments, the RNA polynucleotides comprise contiguously in a 5′ to 3′ orientation the following components, listed for clarity as A, B and C:

[0048] A) A 5′ end segment comprising a first RNA sequence that is the RNA equivalent of, or is transcribed, from an atypical first repeat sequence in a guide-RNA encoding DNA template, including but not limited to a CRISPR array. In embodiments, the 5′ end segment of the guide RNA that is, for example, derived from a repeat sequence, when in operation (e.g., during DNA binding of an RNA-protein complex to facilitate, for example, insertion of a DNA template) comprises or consists of 8 nucleotides.

[0049] B) An RNA sequence for DNA targeting (a targeting sequence, e.g., a spacer), wherein the targeting sequence is complementary to a protospacer in the DNA, and wherein the spacer may have a nucleotide length as further described herein.

[0050] C) A 3′ end segment comprising a second RNA sequence that is the RNA equivalent of, or is transcribed from, a second atypical repeat sequence in the guide RNA encoding DNA template, wherein optionally the 3′ end segment comprises or consists of 20 nucleotides. But additional nucleotides can be included, as further described below.

[0051] The described RNA polynucleotides, e.g., the described guide RNAs, comprise a spacer sequence, including but not limited to a truncated spacer sequence, that may be selected by a user of the described system, to direct the CRISPR system to a selected location in a DNA substrate, thereby facilitating insertion of any desired DNA template at a predetermined location.

[0052] In embodiments, an RNA polynucleotide is a recombinant RNA polynucleotide. A “recombinant” polynucleotide means an RNA polynucleotide that has been experimentally changed relative to a naturally occurring RNA polynucleotide. Thus, a recombinant RNA polynucleotide has been engineered to, for example, include a selected spacer to target a DNA sequence. A recombinant RNA polynucleotide may also include one or more atypical repeats that have been placed in the context of the selected spacer. Recombinant polynucleotides can include RNAs that are expressed from an expression vector designed to encode the desired RNA, or may be chemically synthesized. Recombinant RNA polynucleotides may also include modifications that are further described herein. The disclosure also includes recombinant DNA molecules that, for instance, encode an RNA polynucleotide and/or a protein described herein.

[0053] Certain aspects of the disclosure are illustrated generally by reference to FIG. 15. FIG. 15 shows representative “upstream” and “downstream” repeat sequences (e.g., 5′ and 3′ of an intervening spacer) which, in the natural array setting, is derived from a protospacer with appropriate protospacer adjacent motif (PAM). The DNA sequence is shown in the 5′->3′ orientation, and encodes a guide RNA that can form a complex with the indicated Cas proteins, as shown in the inset. For simplicity, only a single strand of DNA comprising a repeat-spacer-repeat segment of a CRISPR array is shown. The sequence shown in FIG. 15 is identical to the guide RNA, except each T is replaced with a U. The segment of the DNA that encodes the segment of the guide RNA that associates as a single unit with the CRISPR proteins is labeled “This region makes corresponds to the guide RNA shown above.” Thus, the described region illustrates what will be processed as a single guide RNA, and its interaction with a DNA template. Above the Matched Spacer is a cartoon depiction of the processed single guide RNA (labeled “crRNA”), with the relative location of the PAM in the double stranded DNA target. The Cas6 cleavage sites are indicated by the scissors. In FIG. 15, the nucleotides, as numbered with respect to repeats in the array, illustrate the 5′ and 3′ segment boundaries that flank the intervening spacer. RNA polynucleotides for use as guide RNAs according to this disclosure comprise an RNA sequence targeted to a DNA substrate as shown in the “Matched Spacer” segment. The guide RNAs provided by this disclosure comprises RNA nucleotide sequences that are the RNA equivalents to the upstream and downstream repeats, with a variable nucleotide positions illustrated by the relative size of the nucleotides, using FIG. 15 as a non-limiting illustration.

[0054] With respect to FIG. 15, RNA polynucleotides used in the CRISPR-based DNA modification techniques as described herein may be produced from a double-stranded DNA template that includes at least one repeat-spacer-repeat sequence, wherein FIG. 15 shows a single DNA sequence that includes representative and non-limiting upstream and downstream repeats in the CRISPR array.

[0055] Without intending to be bound by any particular theory, it is considered that nucleotides that define atypical repeats as described herein, at least portions of which may be incorporated into guide RNAs of this disclosure, affect the function of the CRISPR systems described herein. However, and again without intending to be bound by theory, it is also considered that nucleotides present in the upstream and downstream atypical repeat sequences in the DNA may influence performance of the CRISPR-based modification of target DNA, even if such RNA equivalent nucleotides are not ultimately present in the processed guide RNA. For example, using FIG. 15 as a non-limiting illustration, in certain embodiments, a first 5′ end segment of a guide RNA of this disclosure may include only nucleotides 21-28 that correspond to the upstream repeat, but this segment, as well as nucleotides in the DNA template further upstream of nucleotide 21, may diverge from reference repeat sequences, and such diverged, atypical sequences, may also contribute to improved performance of the presently provided systems. Thus, in certain embodiments, any one or more of the nucleotides in the first (atypical) 5′/upstream segment repeat of an RNA polynucleotide of this disclosure may differ from a reference repeat in one or any combination of nucleotide positions 21, 22, 23, 24, 25, 26, 27 or 28 of the upstream repeat. In embodiments, only 1, 2, 3, 4, 5, 6, 7, or all 8 such nucleotides are changed relative to a reference repeat. In certain embodiments, nucleotide 21 in the upstream repeat may be the same as, or different from, a reference repeat. The same applies to nucleotide locations further upstream in the atypical repeat, e.g., atypical nucleotides in any one or combination of positions 22-41 of the upstream repeat may affect, and improve, the function of a system of this disclosure. This is considered to be the case, even if such atypical nucleotides are not present in the sequence of a particular guide RNA after it is processed and functions in modification of a sequence dictated at least in part by the targeting DNA segment. Likewise, a 3′ end segment (e.g., a “downstream” segment) of a guide RNA of this disclosure may include nucleotides 1-20 of the downstream repeat, which can include at least some nucleotides that are different from a reference downstream repeat, but the disclosure includes RNA polynucleotides that may extend beyond nucleotide 20 in the downstream repeat.

[0056] In certain embodiments, the 3′ segment will generally, but not necessarily always, include a G as its 3′ terminal nucleotide as a component of a functional guide RNA, e.g., a guide RNA as depicted in the cartoon of FIG. 15. In certain embodiments, nucleotide changes in the downstream repeat either retain the reference repeat sequence in nucleotides 6-9 and 16-20, such as to facilitate formation of an appropriate 3′ hairpin structure, as shown in the cartoon of FIG. 15. However, the disclosure includes changes in the nucleotides 6-9 and 16-20 in the downstream repeat relative to a reference repeat, provided the changed nucleotides are collectively capable of forming a hairpin structure that is believed to be required for guide RNA processing. The disclosure thus includes making RNA polynucleotides that will function as processed guide RNAs from templates that include atypical nucleotides in positions 21-28 of the downstream repeat in the DNA template, even if the RNA equivalents of such sequences are not present in the processed RNA that functions to modify the intended target DNA.

[0057] In certain embodiments, the RNA sequence that targets a DNA targeting sequence (e.g., a spacer) is complementary to a protospacer sequence. The DNA targeting sequence is selected for inclusion in the RNA polynucleotide such that the RNA polynucleotide is suitable for use in CRISPR-based modification of a known DNA target sequence comprising a sequence that is complementary to the targeted DNA sequence in the RNA polynucleotide. In embodiments, the CRISPR modification of DNA using the described RNA polynucleotide as a guide RNA comprises introduction of a transposable element into the DNA that is part of a chromosome or a plasmid.

[0058] In non-limiting examples, in the 5′ end segment, and/or in the 3′ end segment of the RNA polynucleotide, at least one nucleotide within nucleotides positions 1-4 of the nucleotide 5′ end or 3′ end segment sequence is changed in the first and/or second sequence, relative to the same nucleotide position in the reference repeat sequence. Non-limiting illustrations of locations of nucleotide variations in atypical repeats are shown in the figures of this disclosure, and are provided in the sequence listing. The 5′ and 3′ end sequences may vary in 1-10 positions, inclusive, relative to the reference repeat positions. In embodiments, the ribonucleoprotein complex comprising a described RNA polynucleotide is present in a complex with one or a combination of Cas5, Cas6, Cas7, and Cas8. Such a complex may be in vitro or in vivo, such as in a prokaryotic or eukaryotic cell.

[0059] In embodiments, the 5′ end segment and 3′ end segments of the described RNA polynucleotides comprise palindromic sequences that are the same, or are different, from palindromic sequences in the reference repeat sequence(s). In embodiments, the first and/or second reference repeat sequence is the same as a repeat sequence present in a bacterium, or in Archaea, wherein the repeat sequence in the bacterium is contiguous with the last spacer acquired by the organism, or with a spacer that was acquired less recently than another spacer in the same array. Proteins suitable for use with the described guide RNAs are further described below.

[0060] Expression vectors encoding an RNA polynucleotide that comprise atypical repeats (e.g., RNA sequences that are RNA equivalents of atypical repeats or portions of such repeats) described herein, or identified by a method described herein, are included in the disclosure. In embodiments, the disclosure includes RNA polynucleotide transcribed from such an expression vector, wherein the RNA polynucleotides may be isolated and/or purified. Cells comprising such RNA polynucleotides and expression vectors encoding them are included.

[0061] In non-limiting embodiments, the proteins used in the described system comprise at least one protein that is from, or derived from, one or more organisms that include I-F3b transposons. In embodiments, a protein is derived from an organisms by, for example, expressing the protein using an expression vector, or an mRNA that is produced by a user of a described system for modifying a DNA template, as further described herein. A protein derived from a naturally occurring protein may also have modifications, such as nuclear localization signals, and/purification tags.

[0062] In embodiments, the one or more I-F3b proteins include I-F3b transposon proteins TnsA, TnsB, TnsC, TniQ, and I-F3b Cas proteins Cas8, Cas5, Cas7, and Cas6. One or more of the proteins may be fused together, with or without other proteins. In embodiments, Cas8 and Cas5 are present in a single fusion protein. In embodiments, TnsA and TnsB are present in a single fusion protein. In embodiments, TniQ is fused to another of the described proteins. In embodiments, TniC and TniQ are fused to one another. In embodiments, more than two of the described proteins may be present in a fusion protein. In embodiments, the proteins are fused to one another without linking amino acids. In alternative embodiments, linking amino acids can be included. In non-limiting embodiments, linking amino acids may form a flexible linker, and as such may comprise one or more amino acids to provide flexibility, such as Glycine rich linker. In non-limiting embodiments, the linker comprises Glycine and Serine. In an embodiment, the linker comprises 1-12 amino acids. In an embodiment, the linker comprises or consists of a GSG sequence. In embodiments, more than one linker can be used. In an embodiment, the linker comprises a segment of a protein from K. oxytoca. In an embodiment, the K. oxytoca linker comprises a contiguous sequence in an N-terminal to C-terminal direction that comprises all of KYA, QQN, SLF, ICS, and FP. In embodiments, a protein of this disclosure can include a tag, such as a purification tag, or other tags. In an embodiment, the tag comprises a Strep-tag. The amino acid sequence of a suitable Strep-tag is known in the art. In an embodiment, the Strep tag comprises in an N-terminal to C-terminal direction all of WSH, PQF, and EK. In embodiments, a protein of this disclosure comprises a nuclear localization signal (NLS). Suitable NLS sequence are known in the art. In an embodiment, the NLS comprises a contiguous sequence in an N-terminal to C-terminal direction that comprises all of PKK, KRK, and V. In an embodiment, a protein of this disclosure comprises a contiguous sequence that comprises in an N-terminal to C-terminal direction a linker, an NLS, a Strep-tag, and another linker, which may comprise the same sequence as the first linker. In an embodiment, a change to the described amino acid sequence includes a deletion of amino acids. In an embodiment, the terminal HG of, for example, TnsA encoded by Aeromonas salmonicida strain S44 plasmid pS44-1, may be deleted in a fusion protein. In embodiments, deletion of HG is accompanied by an insertion of an A or R at the deleted position. Representative fusion proteins have been constructed and determined to function for transposition in a standard mate out assay (said assay being described in conjunction with FIGS. 3B and 9A) with the F plasmid lacZ target with a single guide RNA, lacZ4 spacer (See FIG. 3E) in the context of atypical repeats. Results using such fusion proteins are presented in FIG. 16. In embodiments, proteins expressed from the described systems may be expressed from a coding sequence that includes a ribosomal skipping sequence. Ribosomal skipping sequences are known in the art and include, in non-limiting embodiments, the ribosomal skipping peptides T2A, P2A, E2A, and F2A

[0063] The described system also provides a DNA cargo sequence for use in insertion into a DNA substrate. The DNA cargo sequence can include left and right end transposon sequences. The transposon left and right end sequences may also be inserted with a DNA cargo. The DNA cargo sequence is inserted into a DNA substrate by cooperation of the described proteins and the targeting RNA to produce the DNA editing. Those skilled in the art will be able to understand the terms “left” and “right” transposon sequences, and recognize such sequences.

[0064] For use with I-F3b systems, the one or more I-F3b proteins may be obtained from, and modified if desired, from any of the organisms that encode I-F3b proteins that are described herein, including in the text, tables and figures. In embodiments, the I-F3b proteins are from, or are derived from, any member of a subset of the described I-F3b transposon containing organisms. In embodiments, an I-F3b protein is encoded by the genome of an organism with an attachment site downstream of the ffs gene encoding the signal recognition particle, and those that are downstream of the downstream of the rsmJ gene.

[0065] Suitable I-F3b proteins and organisms which use them are shown, for example, in the figures. Such organisms which include functional IF-3b systems may be also include other transposable elements.

[0066] In embodiments, the I-F3b proteins are functional with targeting RNAs that include spacer sequences that are shorter than 29 nucleotides, as further described herein, and can exhibit greater transposition frequency than that achieved with other I-F proteins, such as

[0067] IF-3a systems. Further, the increased transposition frequency may be influenced by the presence of one or more atypical repeat sequences, from which at least some nucleotides are included in the targeting RNA when it is operational in DNA editing. Thus, in embodiments, the DNA template from which the targeting RNA is produced comprises one or more atypical repeats, as further described below. Representative examples of atypical repeats are described herein, including in the figures, text and sequence listing. In embodiments, the targeting RNAs include repeat sequences that are the RNA equivalents of segments of repeat sequences in CRISPR arrays, such repeat sequences comprising atypical repeats.

[0068] As discussed above, it has previously been considered that older repeats that flank less recently acquired spacers include mutations that hamper the function of guide RNAs that include the repeats than less recently acquired spacer sequences. In embodiments, the older repeats are located at increasing distances from the AT-rich leader region of the CRISPR array where the repeats are originally inserted. Those skilled in the art will be able to recognize a CRISPR array leader sequence. Further, as is known in the art, new spacer/repeat combinations are added at the leader region near the cas6-encoding gene.

[0069] The present disclosure includes targeting RNAs, which may include precursors, e.g., longer RNA polynucleotides that are transcribed from a CRISPR array and are recognized and/or processed by Cas proteins, which utilize nucleotide sequences that are from repeat sequences that flank a spacer that is not the most recent spacer inserted into the CRISPR array. In embodiments, the targeting RNA is encoded by a template that includes one or more repeat sequences that flank the oldest spacer in a CRISPR array, or a spacer that was not the most recently acquired. In embodiments, a CRISPR array comprises at least two spacers, but the disclosure does not necessarily exclude use of atypical repeat sequences that may be present in a CRISPR RNA coding template that includes only one spacer.

[0070] In more detail, mutations due to DNA replication are more likely to arise and persist in repeats (in repeat-spacer-repeat segments) that are present in a CRISPR array for longer periods of time than their more recently acquired counterparts, resulting in degenerate repeat sequences that have previously been considered not functional for processing into viable guide RNA effector complexes. In particular, to the extent such mutated sequences have been observed, it has been assumed that degenerated repeats in the CRISPR array would, if used to produce a guide RNA, render the guide RNA non-functional, or less functional, in its CRISPR editing functions. However, the present disclosure demonstrates that in some cases the altered repeats are actually enhanced for editing function, at least insofar as certain types of transposon elements are involved in the process, as further described below. As noted above, these repeats with enhanced function are referred to as “atypical” repeats. In embodiments, degenerated repeats may be distinct from changes that arise from a recombination process, or by another homology-driven process where the DNA polymerase skips nucleotides on the template DNA of the repeat to the next repeat, also causing a deletion.

[0071] Again, and without intending to be constrained by any particular interpretation, it is considered that the atypical repeats may be preferentially complexed and processed by certain Cas enzymes, such as Cas5 and Cas6, which recognize 5′ and 3′ repeats (relative to a 5′->3′ oriented, intervening spacer) including but not necessarily limited to the RNA equivalent of the repeats, respectively to make more active guide RNA-Cas protein complexes. Alternatively, or additionally, the resulting guide RNA/Cas protein complexes have enhanced activities that are not found in complexes made with the typical repeats. Accordingly, in embodiments, the disclosure provides an RNA polynucleotide that can be used in CRISPR-based modification of DNA, the RNA polynucleotide comprising contiguously in a 5′ to 3′ orientation: a 5′ end segment comprising a first RNA sequence that is the RNA equivalent of an atypical first repeat sequence in a guide-RNA encoding DNA template, an RNA sequence for DNA targeting (a targeting sequence), wherein the targeting sequence is fully or at least partially complementary to a protospacer in the targeted DNA; and a 3′ end segment comprising a second RNA sequence that is the RNA equivalent of a second atypical repeat sequence in the guide-RNA encoding DNA template. The 5′ end segment, the 3′ end segment, or both, comprise one or more nucleotide changes relative to a first reference repeat sequence, and/or a second reference repeat sequence, respectively. In embodiments, the 5′ end segment and the 3′ end segment of the RNA polynucleotide each comprise one or more nucleotide changes relative to the first and second reference repeat sequences, respectively, and as further described below.

[0072] The reference sequence can be any suitable sequence that is different from the first and/or second repeat sequences that are components of the RNA polynucleotide and may include additional sequences found in repeats that are not necessarily included in a processed guide RNA that is used during DNA editing. In embodiments, the reference sequence comprises a repeat sequence that is immediately adjacent to a more recently acquired spacer in the same array as the atypical repeat. Thus, in embodiments, the 5′ end segment, the 3′ end segment, or both, in a targeting RNA, each comprise one or more nucleotide changes relative to the first and second reference repeat sequences, respectively. Thus, the disclosure includes use of repeat sequences that flank earlier acquired spacers. In this regard, and as is known in the art generally for certain CRISPR systems, repeats in the CRISPR array encode the guide RNA “handles” that are bound by Cas proteins, the guide RNAs being processed from a crRNA.

[0073] A non-limiting illustration of the processing of a crRNA that includes typical and atypical repeats is shown in FIG. 3, which is in addition to FIG. 15, and other figures of this disclosure. In FIG. 3A, bottom panel, the first R1 on the left shows the 5′ end of an unprocessed CRISPR array transcript. The second R1 from the left shows a 5′ handle transcribed from a typical repeat and its cleavage site shown by the first scissors and vertical line. S1 shows the location of a representative 32 nucleotide spacer that was more recently acquired in the CRISPR array, relative to the S2 spacer. The second R2 shows a typical 3′ stem loop. The second scissors and vertical line show the location of cleavage to produce the 3′ end of a first, e.g., more recently acquired spacer, and downstream repeat with a typical 3′ stem loop. To the right of the second scissors shows an atypical 5′ handle that is produced by the cleavage illustrated by the second scissors, followed by a later acquired spacer S2, and an atypical 3′ stem loop designated by R3. Differences between the repeat-spacer-repeat segments are apparent in the two UU nucleotides preceding S2, the A immediately following S2, the UUU sequence prior to the first strand of the stem loop, and the A in the fourth position of the atypical loop portion of the stem loop. FIGS. 3B, 3C and 3D provide graphical representations of data comparing use of targeting RNA that is transcribed from the described earlier and later acquired spacers. These data show that the targeting RNA transcribed and processed from the template that includes atypical repeats can facilitate enhanced transposition of a DNA element, relative to the targeting RNA that is transcribed from the segment of the template that includes typical repeat sequences. Thus, the disclosure demonstrates that use of a targeting RNA that is transcribed from a template that includes atypical repeats provides a beneficial effect on transposition efficiency. More discussion of FIG. 3 is provided in the Examples below.

[0074] Accordingly, use of targeting RNAs that are transcribed from a DNA template that includes atypical repeats may improve the function of any guide-RNA directed CRISPR system, and while the disclosure illustrated certain advantages of using the described gRNAs with Type IF-3b systems, the disclosure includes use of atypical repeats with any suitable CRISPR system, including but not limited to any Tn7-CRISPR/Cas elements, including but not limited to any I-F elements, and Type III, II, IV, V, VI systems, Type 1 and Type 2 CRISPR systems, Cas12K and multiple Type I-B systems. Further, the described atypical repeats may be used with any other Cas enzymes that can recognize the described handles. Such systems may include altered spacers, such as shortened spacers. In this regard, the present disclosure expands the demonstration of enhanced function of atypical repeats by demonstrating that targeting RNAs that are transcribed from a template that includes atypical repeats can be effective in increasing transposition frequency when used with Cas12K and multiple Type I-B systems. Further, enhanced transposition can be achieved, such as with I-F3b systems, but when shorter spacers (which may be accompanied by one or two atypical repeats) than those shown in FIG. 3 are used. For instance, while FIG. 3 depicts 32 nucleotide spacers ([N32]), the present disclosure includes use of shorter spacers to enhance transposition efficiency, which in embodiments is performed using an I-F3b system. A “system” as used herein means a combination of proteins and a guide RNA that are together necessary and sufficient to achieve DNA modification, non-limiting examples of which are discussed herein.

[0075] Notwithstanding the foregoing description, it is considered that the use of the described guide RNAs are suitable in one embodiment, for use with IF-3b systems, as described further herein. Additionally, the disclosure provides demonstrations that use of the described IF-3b systems exhibits increased transposition efficiency, relative to a control, such as an IF-3a system. Accordingly, in embodiments, the disclosure provides for use of the described guide RNAs, which may comprise and/or be transcribed from a CRISPR array that comprises at least one atypical repeats and may also comprise a shortened spacer.

[0076] It should be noted the sequence listing included as a part of this disclosure includes spacers from certain organisms that are only 31 nucleotides long. It is considered that certain systems use spacers that are generally 32 nucleotides long, but length variations can be present and still not provide enhanced transposition in the same manner as the truncated spacers of this disclosure. Thus, in embodiments, the present disclosure provides targeting RNAs that comprise spacer sequences may be fewer than 29 nucleotides in length. In this regard, targeting RNAs with shorter (e.g., 18-20 nucleotides) spacers are shown to have reduced or no detectable transposition function when used with, for example, I-F3a systems (Klompe et. al. 2019a).

[0077] A non-limiting demonstration showing that truncated spacers are functional with I-F3b systems is provided the figures. Thus, the disclosure provides an unexpected advantage in using targeting RNAs that are transcribed from templates that include atypical repeats, and using truncated spacers. The disclosure thus includes targeting RNAs that are transcribed from templates that include one or two atypical repeats and optionally, a truncated spacer. In embodiments, a guide RNA of this disclosure may include a segment transcribed from only one atypical repeat, or more than segment transcribed from an atypical repeat, wherein each segment includes a sequence that is the same as the atypical repeat. In embodiments, a guide RNA of this disclosure comprises more than one copy of the same atypical repeat. In embodiments, a guide RNA of this disclosure may include two atypical repeats flanking the same, or different spacers. In embodiments, the guide RNA may contain only one spacer, or more than one copy of the same spacer, or two or more different spacers. The guide RNAs are different from those produced naturally at least because the selected spacer does not appear in nature in the context of atypical repeats. The guide RNAs of the disclosure may also be different from those that appear in nature due to having at least a segment that is transcribed from an atypical repeat that is configured to operate with a selected spacer that was not encoded in an endogenously occurring CRISPR array.

[0078] In embodiments, a spacer of this disclosure may consist of 18, 19, 20, 21, 22, 23, or 24 nucleotides. In embodiments, a spacer comprises 1, 2, 3, 4, or 5 nucleotides that is/are transcribed from what is designated as an atypical repeat sequence in a CRISPR array, as described further herein. In embodiments, the 5′ end segment and 3′ end segments of the described RNA polynucleotides comprise palindromic sequences that are the same, or are different, from palindromic sequences in the reference repeat sequence(s). In embodiments, a spacer becomes atypical by reducing the size of a loop structure.

[0079] In embodiments, a handle of a guide RNA of this disclosure includes a 5′ nucleotide sequence that is CCUAC or a truncation of this sequence that is UAC, said sequences being encoded by the CRISPR array, which can include sequences encoding atypical repeat sequences. In embodiments, a CC sequence is part of a repeat sequence or part of a spacer sequence, or both, depending on which end of the spacer is being considered.

[0080] In more detail, guide RNAs (also referred to as targeting RNAs as discussed above) may be encoded by a CRISPR construct, including but not necessarily limited to a CRISPR array. In embodiments, a suitable guide RNA or a guide RNA precursor includes only one set of atypical repeats that flank one spacer sequence, or more than one set of the same or distinct atypical repeats that flank the same or distinct spacer sequences, may be used. It is expected that based on the present disclosure, a suitable targeting RNA can be produced with any guide RNA that is an aspect of this disclosure, e.g., the typical 5′ end or 3′ end that forms the guide RNA can be engineered to form a sequence that is the RNA equivalent of an atypical repeat.

[0081] As also discussed above, the described I-F3b systems use I-F3b CRISPR associated proteins (or Cas proteins) to make a complex (Cas proteins+guide RNA) to target DNAs that match the guide RNA sequence, with tolerance for certain mismatches between the spacer and a protospacer, as described further herein. Naturally occurring elements have evolved to use a subset of the I-F3b Cas proteins (Cas8/5f, Cas7f, and Cas6f) to process a cognate CRISPR array containing the guide RNA to target a cognate element to direct transposition adjacent to the DNA match to the guide RNA sequence, again with certain potential mismatches. I-F3b Cas8/5f (also referred to as Cas8-5) are naturally fused, and the present disclosure includes such fusion proteins. The I-F3b transposon proteins TnsA, TnsB, TnsC, and TnsD/TniQ recognize cognate “left” and “right” transposon DNA sequences that may be present in the targeted DNA substrate or in an insertion DNA template. As is known in the art, each left and right end sequence pair is ordinarily associated with a particular set of tnsA, tnsB and tnsC genes, and the left and right end sequences are considered “cognate” with respect to the particular tnsA, tnsB and tnsC cassette.

[0082] The disclosure includes intact proteins described herein, and also includes functional fragments thereof. A “functional fragment” means one or more segments of contiguous amino acids of a polypeptide described herein which retain sufficient capability to participate in target RNA programmed insertion of the DNA insertion template. In embodiments, a functional fragment may therefore comprise or consist of, for example, a core domain, a catalytic domain, a polynucleotide binding domain, and the like. A single domain, or more than one domain, can be present in a functional fragment.

[0083] In embodiments, combinations of naturally occurring proteins, wherein the proteins are from distinct sources, are used.

[0084] In embodiments, the compositions and methods of this disclosure are functional in a heterologous system. “Heterologous” as used herein means a system, e.g., a cell type, in which one or more of the components of the system are not produced without modification of the cells/system. A non-limiting embodiment of a heterologous system is any bacteria that is not Aeromonas salmonicida, including but not necessarily limited to Aeromonas salmonicida strain S44. In embodiments, a representative and non-limiting heterologous system is any type of E. coli. A heterologous system also includes any eukaryotic cell. In embodiments, the heterologous cell is a member of any group that does not endogenously use an I-F3b system. In embodiments, the disclosure includes adapting any proteins, repeat sequences, and guide RNA sequences, that are described in the sequence listing and the figures, which have a matched spacer length that is fewer than 31 nucleotides in length.

[0085] In embodiments, the presently described systems are used to insert a DNA insertion template to virtually any position in a bacterial genome, any episomal element, or a eukaryotic chromosome, in an orientation dependent fashion, but in certain instances may require a PAM sequence. In embodiments, the system is targeted via a targeting RNA to a sequence in a chromosome in a eukaryotic cell, or to a DNA extrachromosomal element in a eukaryotic cell, such as a DNA viral genome. Thus, the disclosure includes modifying eukaryotic chromosomes, and eukaryotic extrachromosomal elements, such as DNA in any organelle. Accordingly, the type of extrachromosomal elements that can be modified according to the presently described compositions and methods are not particularly limited.

[0086] In embodiments, systems of this disclosure include a DNA cargo for insertion into a eukaryotic chromosome or extrachromosomal element, or in the case of prokaryotes, a chromosome or a plasmid. Thus, instead of transposing an existing segment of a genome in the manner in which transposons ordinarily function, the disclosure provides for insertion of DNA cargo that can be selected by the user of the system. The DNA cargo may be provided, for example, as a circular or linear DNA molecule. The DNA cargo can be introduced into the cell prior to, concurrently, or after introducing a system of the disclosure into a cell. The sequence of the DNA cargo is not particularly limited, other than a requirement for suitable right and left ends that are recognized by proteins of the system. The right and left end sequences that are required for recognition are typically from about 90-150-bp in length. As is known in the art, such 90-150 bp length comprises multiple 22 bp binding sites for the I-F3b TnsB transposase in the element in each of the ends that can be overlapping or spaced.

[0087] The minimum length of the DNA cargo is typically about 700 bp, but it is expected that from 700 bp to 120 kb can be used and inserted. The disclosure provides for insertion of a DNA cargo without making a double-stranded break, and without disrupting the existing sequence, except for residual nucleotides at the insertion site, as is known in the art for transposons. In embodiments, the insertion of the DNA cargo occurs at a position that is from approximately 47, 48, or 49 nucleotides from a protospacer in the target (e.g., chromosome or plasmid) sequence.

[0088] Without intending to be constrained by any particular theory, it is considered that, other than a requirement for certain sequences to function with the I-F3b sequences as described herein, the presently provided systems are ambivalent with respect to the DNA sequence of the DNA insertion template. Accordingly, in embodiments, the DNA insertion template may be devoid of any sequence that can be transcribed, and as such may be transcriptionally inert. Such sequences may be used, for example, to alter a regulatory sequence in a genome, e.g., a promoter, enhancer, miRNA binding site, or transcription factor binding site, to result in knockout of an endogenous gene, or to provide an interval in the dsDNA substrate between two loci, and may be used for a variety of purposes, which include but are not limited to treatment of a genetic disease, enhancement of a desired phenotype, study of gene effects, chromatin modeling, enhancer analysis, DNA binding protein analysis, methylation studies, and the like.

[0089] In embodiments, the DNA sequence comprises a sequence that may be transcribed by any RNA polymerase, e.g., a eukaryotic RNA polymerase, e.g., RNA polymerase I, RNA polymerase II, or RNA polymerase III. In embodiments, the RNA that is transcribed may or may not encode a protein, or may comprise a segment that encodes a protein and a non-coding sequence that is functional. For example, functional RNAs include any catalytic RNA, or an RNA that can participate in an RNAi-mediated process. In embodiments, the functional RNA comprises all or a fragment of an siRNA, an shRNA, a tRNA, a spliceosomal RNA, or any type of micro RNA (miRNA), a snoRNA, or the like. In embodiments, the RNA that does not code for a protein encodes a long noncoding RNA (lncRNA).

[0090] In embodiments, the functional RNA may comprise a catalytic segment, and thus may be provided as a ribozyme. In embodiments, the ribozyme comprises a hammerhead ribozyme, a hairpin ribozyme, or a Hepatitis Delta Virus ribozyme. Such agents can be used, for example, to modulate any RNA to which they are targeted.

[0091] In embodiments, the DNA insertion template includes one or more promoters. The promoter may be constitutive or inducible. The promoter may be operably linked to a sequence that encodes any protein or peptide, or a functional RNA.

[0092] In embodiments, the DNA insertion template comprises one or more splice junctions. Thus, the insertion template may comprise a GU near a 5′ end of a coding sequence, and a branch site near the 3′ end of the coding sequence. In embodiments, the DNA insertion templates results in exon skipping, or it provides a mutually exclusive exon, or it provides an alternative 5′ splice junction as a donor site, or an alternative 3′ splice junction as an acceptor site, or a combination thereof. In embodiments, the DNA insertion template reduces or eliminates intron retention.

[0093] In embodiments, the DNA insertion template comprises at least one open reading frame, which may be operably linked to a promoter that is included with the DNA insertion template, or the DNA insertion template is linked to an endogenous cell promoter once integrated. The open reading frame, and thus the protein encoded by it, is not limited. In non-limiting embodiments, the DNA insertion template comprises an open reading frame that encodes a peptide, e.g., a peptide that can be translated and which may be, for example, from several to 50 amino acids in length, whereas longer sequences are considered proteins.

[0094] In embodiments, a protein encoded by the DNA insertion template includes a cellular localization signal, and thus may be transported to any particular cellular compartment. In embodiments, the encoded protein comprises a secretion signal. In embodiments, the encoded protein comprises a transmembrane domain, and thus may be trafficked to, and anchored in a cell membrane. In embodiments, the anchored protein may comprise either or both of an intracellular domain and an extracellular domain, and may accordingly be displayed on the cells surface, and may further participate in, for example, signal transduction, e.g., the protein comprises a surface receptor. In embodiments, a protein encoded by the DNA integrate template comprise a nuclear localization signal. In embodiments, a protein encoded by the DNA integrate template comprises one or more glycosylation sites.

[0095] In embodiments, the protein encoded by the DNA insertion template comprises at least one antigenic determinant, e.g., an epitope, and thus may be used to produce cells, such as antigen presenting cells, that may display a peptide comprising an epitope on the cell surface via MHC (e.g, HLA) presentation.

[0096] In embodiments, the protein encoded by the DNA insertion template encodes a binding partner, such as an antibody or antigen binding fragment of an antibody. In embodiments, the binding partner comprises an intact immunoglobulin, or as fragments of an immunoglobulin including but not necessarily limited to antigen-binding (Fab) fragments, Fab′ fragments, (Fab′)₂ fragments, Fd (N-terminal part of the heavy chain) fragments, Fv fragments (two variable domains), dAb fragments, single domain fragments or single monomeric variable antibody domains, isolated CDR regions, single-chain variable fragment (scFv), and other antibody fragments that retain antigen binding function. In embodiments, one or more binding partners are encoded by the DNA insertion template and encode all or a component of a Bi-specific T-cell engager (BiTE), a bispecific killer cell engager (BiKE), or a chimeric antigen receptor (CAR), such as for producing chimeric antigen receptor T cells (e.g. CAR T cells). In embodiments, the binding partners are multivalent, and as such may include tri-specific antibodies or other tri-specific binding partners.

[0097] In embodiments, the DNA insertion template encodes a T cell receptor, and thus may encode both an alpha and beta chain T cell receptor, or separate DNA insertion template s may be used.

[0098] In embodiments, the DNA insertion template encodes an enzyme; a structural protein; a signaling protein, a regulatory protein; a transport protein; a sensory protein; a motor protein; a defense protein; or a storage protein. In embodiments, the DNA insertion template encodes a protein or peptide hormone. In embodiments, the DNA insertion template encodes hemoglobin. In embodiments, the DNA insertion template encodes all or a segment of dystrophin. In embodiments, the DNA insertion template encodes a rod or cone protein. In embodiments, the DNA insertion template encodes a selectable or detectable marker. In embodiments, the detectable marker comprises a fluorescent protein, such as green fluorescent protein (GFP), enhanced GFP (eGFP), mCherry, and the like. In embodiments, the DNA insertion template encodes an auxotrophic marker, such as for use in yeast. In embodiments, the DNA insertion template encodes one or more proteins that are involved in a metabolic pathway.

[0099] In embodiments, the DNA insertion template encodes a peptide or protein that is intended to stimulate an immune response, which may be a humoral and/or cell mediated immune response, and may also include a peptide or protein that is intended to induce tolerance, such as in the case of an autoimmune disease or an allergy. In embodiments, the DNA insertion template encodes a Toll-like-receptor (TLR), or a TLR ligand, which may be an agonist or an antagonistic TLR ligand.

[0100] In embodiments, the DNA insertion template comprises a sequence that is intended to disrupt or replace a gene or a segment of a gene. Thus, the disclosure includes producing both knock in and knock out gene modifications in cells, and transgenic non-human animals that contain such cells, as well as prokaryotic cells modified in a similar manner.

[0101] In embodiments, the transposable DNA cargo sequence is inserted into the chromosome or extrachromosomal element within a 5 nucleotide sequence that includes the nucleotide that is located 47 nucleotides 3′ relative to the 3′ end of the protospacer. In embodiments, a DNA cargo insertion comprises an insertion at the center of a 5 bp target site duplication (TSD). Thus, in non-limiting embodiments, a suitable guide RNA directs an editing complex to a DNA target comprising PAM that is cognate to the protospacer, so that precise integration of a DNA cargo can be achieved. In embodiments, the PAM comprises or consists of TACC or CC, NC, or CN (where “N” is any nucleotide).

[0102] The I-F3b transposon and I-F3b Cas genes, or those from any other suitable system, can be expressed from any of a wide variety of existing mechanism that can replicate separately in the cell or be integrated into the host cell genome. Alternatively, they could be expressed transiently from an expression system that will not be maintained. In certain embodiments, the proteins themselves could be directly transformed into the host strain to allow their function. The disclosure allows for multiple copies of distinct transposon gene cassettes, multiple copies of Cas genes, CRISPR arrays, and multiple distinct cargo coding sequences to be introduced and to modify genetic material in the same cell. In embodiments a first set of I-F3b genes tnsA, tnsB, tnsC, and one or more I-F3b tniQ genes, and I-F3b Cas genes cas8f, cas5f, cas7f, and cas6f, and a sequence encoding at least a first guide RNA that is functional with I-F3b proteins encoded by the Cas genes, wherein at least one of the first set of I-F3b transposon genes, the I-F3b Cas genes, or the sequence encoding the first guide RNA are present within and/or are encoded by a recombinant polynucleotide that is introduced into heterologous bacteria, or eukaryotic cells. The disclosure thus includes second, third, fourth, fifth, or more copies of distinct I-F3b transposon genes, I-F3b Cas genes, and distinct cargo coding sequences.

[0103] The delivery vector can be based on any number of plasmid, bacteriophage or another genetic element, when used in prokaryotes. The vector can be engineered so it is maintained, or not maintained (using any number of existing plasmid, bacteriophage or other genetic elements). Delivery of these DNA constructions in bacteria can be by conjugation, bacteriophage or any transformation processes that functions in the bacterial host of interest.

[0104] Modifications of this system may include adapting the expression system to allow expression in eukaryotic or archaeal hosts. In embodiments, for eukaryotic cells, the disclosure includes use of at least one nuclear localization signal (NLS) in one or more proteins. In general, a suitable NLS includes one or more short sequences of positively charged lysines or arginines exposed on the protein surface. In embodiments, a system of this disclosure is introduced into eukaryotic cells using, for example, one or more expression vectors, or by direct introduction of ribonucleoproteins (RNPs). In embodiments, expression vectors comprise viral vectors. In embodiments, a viral expression vector is used. Viral expression vectors may be used as naked polynucleotides, or may comprises any of viral particles, including but not limited to defective interfering particles or other replication defective viral constructs, and virus-like particles. In embodiments, the expression vector comprises a modified viral polynucleotide, such as from an adenovirus, a herpesvirus, or a retrovirus, such as a lentiviral vector. In embodiments, a baculovirus vector may be used. In embodiments, any type of a recombinant adeno-associated virus (rAAV) vector may be used. In embodiments, a recombinant adeno-associated virus (rAAV) vector may be used. rAAV vectors are commercially available, such as from TAKARA BIO® and other commercial vendors, and may be adapted for use with the described systems, given the benefit of the present disclosure. In embodiments, for producing rAAV vectors, plasmid vectors may encode all or some of the well-known rep, cap and adeno-helper components. In certain embodiments, the expression vector is a self-complementary adeno-associated virus (scAAV). Suitable ssAAV vectors are commercially available, such as from CELL BIOLABS, INC.® and can be adapted for use in the presently provided embodiments when given the benefit of this disclosure.

[0105] Further modification of this approach can include expression and isolation of the proteins required for this process and carrying out some or all of the process in vitro to allow the assembly of novel DNA substrates. These DNA substrates can subsequently be delivered into living host cells or used directly for other procedures. Thus, the disclosure includes compositions, methods, vectors, and kits for use in the present approach to DNA editing.

[0106] In one example, the disclosure provides a system for modifying a genetic target in bacteria and/or eukaryotic cells. The system comprises a first set of I-F3b transposon genes tnsA, tnsB, tnsC, one or more I-F3b tniQ, Cas genes cas8f cas5f cas7f, and cas6f and a sequence encoding a first guide RNA as described herein that is functional at least with proteins encoded by the I-F3b Cas genes, wherein at least one of the first set of transposon genes, the Cas genes, and/or or the sequence encoding the first guide RNA are present within and/or are encoded by a recombinant polynucleotide.

[0107] In embodiments, use of the described I-F3b systems exhibit a greater transposition frequency than transposition reference frequency. In embodiments, use of the described I-F3b systems exhibit a greater transposition frequency than a transposition frequency using the same set of proteins and guide RNA but where the proteins are from an I-F3a system. In embodiments, for instance in bacteria, transposition frequency can be determined using, for example, a bacteriophage (i.e. viral) vector that cannot replicate or integrate into the bacterial strain used in the assay. Therefore, while the viral vector injects its DNA into the cell, it is lost during cell replication. Encoded in the phage DNA is a miniature Tn7 element where the Right and Left ends of the element flank a gene that encodes resistance to an antibiotic, such as Kanamycin (KanR). If the transposon remains on the bacteriophage DNA the cell will still be killed by the antibiotic because the bacteriophage cannot be maintained in that particular strain of bacteria. However if the TnsA, TnsB, TnsC and other required I-F3b transposon proteins and nucleotide sequences described herein are added to the cell, transposition will occur because the transposon can move from the bacteriophage DNA into the chromosome (or plasmid) where it will be maintained and allow a colony of bacteria to grow that is antibiotic resistant. Therefore, when the number of infectious bacteriophage particles are in the assay is known, it permits calculation of a frequency of transposition as antibiotic resistant colonies of bacteria per bacteriophage used in the experiment. Thus, in embodiments, using one or a combination of the I-F3b proteins described herein increases transposition frequency. Accordingly, in some embodiments, one or more I-F3b proteins and guide RNA elements as described herein may be used to enhance CRISPR mediated insertion that is accompanied by the transposon-based constructs that are described herein.

[0108] In alternative embodiments, detectable markers and selection elements can be used. In embodiments, transposition frequency can be measured, for example, by a change in expression in a reporter gene. Any suitable reporter gene can be used, non-limiting examples of which include adaptations of standard enzymatic reactions which produce visually detectable readouts. In embodiments, adaptations of β-galactosidase (LacZ) assays are used. In embodiments, transposition of an element from one chromosomal location to another, or from a plasmid to a chromosome, or from a chromosome to a plasmid, results in a change in expression of a reporter protein, such as LacZ. In embodiments, use of a system described herein causes a change in expression of LacZ, or any other suitable marker, in a population of cells. In embodiments, transposition efficiency is determined by measuring the number of cells within a population that experience a transposition event, as determined using any suitable approach, such as by reporter expression, and/or by any other suitable marker and/or selection criteria. In embodiments, the disclosure provides for increased transposition, such as within a population of cells, relative to a control. As described above, the control can be any suitable control, such as a reference value, or any value using a control experiment with I-F3a transposon proteins. In embodiments, the reference value comprises a standardized curve(s), a cutoff or threshold value, and the like. In embodiments, transposition efficiency comprises use of a system of this disclosure to transpose all or a segment of DNA from one location to another within the same or separate chromosomes, from a chromosome to a plasmid, or from a plasmid or other DNA cargo to a chromosome. In embodiments, transposition efficiency is greater than a control value obtained or derived from transposition efficiency using the described system.

[0109] In one aspect, the disclosure provides a system for modifying a genetic target in one or more cells, the system comprising a first set of transposon genes tnsA, tnsB, tnsC, and tniQ, Cas genes cas8f, cas5f cas7f and cas6f and optionally an xre gene encoding a transcription regulator, or optionally one or more proteins encoded by one or more of said genes, and wherein optionally at least two of said proteins are within a fusion protein, and a sequence encoding an RNA polynucleotide comprising a sequence that is partially or fully an RNA equivalent of an atypical repeat. Wild type or modified genes, and proteins encoded by wild type or modified genes, may be used. For example, in non-limiting embodiments, the tnsA gene optionally comprises a change in sequence such that at least one amino acid in the TnsA protein encoded by the tnsA gene is changed relative to its wild type sequence. In embodiments, at least one of the following is true:

[0110] i) the tnsB gene comprises a change in sequence such that at least one amino acid in the TnsB protein encoded by the tnsB gene is changed relative to its wild type sequence or if the protein is used the protein comprises said change;

[0111] ii) the tnsC gene comprises a change in sequence such that at least one amino acid in the TnsC protein encoded by the tnsC gene is changed relative to its wild type sequence or if the protein is used the protein comprises said change.

[0112] In embodiments, a change in the TnsA protein comprises a change of Ala at position 125 of an Aeromonas salmonicida TnsA protein, wherein optionally the change is to an Asp, or is a homologous change in a homologous TnsA protein.

[0113] In another embodiment the disclosure provides a method comprising expressing an RNA polynucleotide as described above in cells comprising first transposon genes tnsA, tnsB, tnsC, and optionally at least one tniQ, Cas genes cas8f, cas5f, cas7f, and cas6f, and optionally xre, wherein optionally at least one of the first set of transposon genes or the Cas genes are present within a recombinant polynucleotide. In embodiments, spacer is in the RNA polynucleotide is targeted to a DNA segment in a chromosome or plasmid in the cells, which may comprise a protospacer and may be adjacent to a suitable PAM.

[0114] In another embodiment, the disclosure provides a method for identifying and using atypical repeat sequences and/or truncated spacer sequences that can be used as templates for producing RNA polynucleotides as described herein. This method comprises analyzing CRISPR arrays and determining repeat sequences flanking spacers in the CRISPR arrays, comparing repeat sequences flanking earlier acquired spacers to repeat sequences flanking later acquired spacers, determining differences between repeat sequences flanking the earlier and later acquired spacers, and designating the repeat sequences flanking the earlier acquired spacers that are different from the repeat sequences flanking the later acquired spacers as candidates for use in CRISPR-based DNA modification with improved efficiency, relative to CRISPR-based DNA modification using the RNA comprising segments that are RNA equivalents of repeat sequences flanking the later acquired spacers. The same approach applies to identifying truncated spacers, e.g., spacers that are shorter in nucleotide length than were previously believed to be non-functional, or exhibiting reduced function, relative to normal spacer lengths.

[0115] In embodiments, the method further comprises producing an RNA polynucleotide comprising the 5′ and 3′ ends that are RNA equivalents of the repeats flanking the earlier acquired spacers (and may include spacers that are shorter than previously used for targeting any suitable protospacer). In embodiments, this method further comprises using the described RNA polynucleotide in a CRISPR-based DNA modification. In embodiments, the method is such that the RNA polynucleotide comprises a substitution of the spacer in the analyzed CRISPR array with a distinct sequence targeted to a predetermined DNA sequence present in a chromosome or plasmid. The disclosure includes RNA polynucleotides produced according to the described method, and expression vectors that encode such RNA polynucleotides. In one embodiment, a library of atypical repeat sequences is provided. In embodiments, a library of expression vectors encoding RNA polynucleotides identified by a described method is provided.

[0116] In another embodiment, the disclosure provides a database comprising a plurality of entries, the entries comprising or consisting of repeat sequences flanking earlier acquired spacers identified according to a method of this disclosure, and thus also comprises RNA sequences that are complete or partial RNA equivalents of such repeat sequences. In embodiments, the disclosure includes selecting one or more repeat sequences from the database, and producing an expression vector encoding segments that are RNA equivalents of all or a portion of the one or more repeats, and/or producing an RNA polynucleotide comprising the one or more RNA equivalent sequences, which may or may not include a sequence targeted to any protospacer.

[0117] In another embodiment, the disclosure provides a kit for producing an expression vector for use in CRISPR-based DNA modification, the kit comprising a vector comprising one or more restriction endonuclease recognition sites configured for cloning a desired targeting DNA such that the targeting DNA is contiguous with one or more sequences that are RNA equivalents of repeat sequences identified according to a method of this disclosure, and/or any particular atypical repeat sequence that is described herein.

[0118] An RNA polynucleotide (e.g., a guide RNA) for use in CRISPR-based modification of DNA, the RNA polynucleotide comprising contiguously in a 5′ to 3′ orientation: A) A 5′ end segment comprising a first RNA sequence that is the RNA equivalent of, or is transcribed, from an atypical first repeat sequence in a guide-RNA encoding DNA template. In embodiments, the 5′ end segment of the guide RNA, when in operation is associate with CRISPR proteins (e.g., during DNA binding of an RNA-protein complex to facilitate, for example, insertion of a DNA template) comprises or consists of 8 nucleotides; B) an RNA sequence for DNA targeting (a targeting sequence, e.g., a spacer), wherein the targeting sequence is complementary to a protospacer in the DNA; C) and a 3′ end segment comprising a second RNA sequence that is the RNA equivalent of, or is transcribed from, a second atypical repeat sequence in the guide-RNA encoding DNA template, wherein optionally the 3′ end segment comprises or consists of 20 nucleotides, but additional nucleotides can be included, as further described below. The described RNA polynucleotides, e.g., the described guide RNAs, may comprise a spacer sequence that is selected by a user of the described system, to direct the CRISPR system to a selected location in a DNA substrate, thereby facilitation of insertion of a DNA template, which also may be selected by the user of the described system.

[0119] In embodiments, increased transposition frequency is believed to be influenced by the presence of one or more atypical repeat sequences, from which at least some nucleotides are included in the targeting RNA when it is operational in DNA editing. Accordingly, the disclosure demonstrates increased transposition efficiency using the I-F3b system, relative to transposition frequency using an IF-3b system with the same guide RNAs.

[0120] As discussed above, a representative IF-3b system includes the described guide RNAs, and proteins obtained or derived from Aeromonas salmonicida, including but not necessarily limited to Aeromonas salmonicida strain S44. Additional organisms that include IF-3b systems are provided in Table A. However, it is considered that non IF-3b systems, if present in any of these organisms, will not exhibit enhanced transposition when used with the described guide RNAs and CRISPR systems.

TABLE A
Representative organisms containing IF-3b systems.

| | | | SEQ ID |
|---|---|---|---|
| Genus | species | strain | NOS |
| Shewanella | piezotolerans | WP3 | 1-7 |
| Pseudoalteromonas | spongiae | UST010723-006 | 8-14 |
| Pseudoalteromonas | undina | NCIMB 2128 | 15-20 |
| Grimontia | indica | AK16 | 21-26 |
| Vibrio | parahaemolyticus | CFSAN007435 | 27-34 |
| Vibrio | vulnificus | VV4-03 | 35-40 |
| Vibrio | parahaemolyticus | 856404 | 41-46 |
| Vibrio | crassostreae | J5-20 | 47-52 |
| Vibrio | crassostreae | LGP7 | 53-58 |
| Vibrio | splendidus | UCD-SED7 | 59-64 |
| Vibrio | splendidus | UCD-SED10 | 65-70 |
| Pseudoalteromonas | rubra | SCSIO 6842 | 71-76 |
| Aliivibrio | sp. | 1S165 | 77-78 |
| Vibrio | parahaemolyticus | GCSL_R144 | 79-84 |
| Vibrio | cholerae | TP | 85-92 |
| Vibrio | parahaemolyticus | MAVP4 | 93-100 |
| Vibrio | parahaemolyticus | MAVP78 | 101-108 |
| Vibrio | parahaemolyticus | MAVP-112 | 109-116 |
| Vibrio | parahaemolyticus | CTVP34C | 117-124 |
| Vibrio | coralliilyticus | RE87 | 125-130 |
| Vibrio | lentus | 10N.286.46.A11 | 131-136 |
| Vibrio | breoganii | 10N.222.49.A8 | 137-141 |
| Vibrio | breoganii | 10N.222.51.A12 | 142-146 |
| Vibrio | tasmaniensis | 10N.261.51.E11 | 147-152 |
| Vibrio | breoganii | 10N.261.51.E6 | 153-157 |
| Vibrio | splendidus | ZS_138 | 158-163 |
| Vibrio | splendidus | ZS_90 | 164-169 |
| Vibrio | crassostreae | 28_O_19 | 170-175 |
| Vibrio | cholerae | 1 | 176-179 |
| Pseudoalteromonas | ruthenica | S3245 | 180-188 |
| Pseudoalteromonas | ruthenica | S2898 | 189-197 |
| Vibrio | parahaemolyticus | F10_3 | 198-203 |
| Vibrio | parahaemolyticus | B6_5 | 204-211 |
| Vibrio | cholerae | N2780 | 212-217 |
| Vibrio | mimicus | VM223 | 218-221 |
| Vibrio | crassostreae | 9ZC13 | 222-227 |
| Vibrio | sp. | J2-12 | 228-233 |
| Vibrio | sp. | J2-15 | 234-238 |
| Vibrio | cholerae | YB3G04 | 239-244 |
| Vibrio | cholerae | YB2A06 | 245-250 |
| Vibrio | fluvialis | FDAARGOS_104 | 251-254 |
| Vibrio | natriegens | ATCC 14048 | 255-260 |
| Vibrio | natriegens | CCUG 16373 | 261-263 |
| Vibrio | parahaemolyticus | CDC_K5276 | 264-271 |
| Vibrio | sp. | 10N.261.45.E1 | 272-279 |
| Pseudoalteromonas | sp. | A601 | 280-286 |
| Vibrio | parahaemolyticus | MAVP56 | 287-294 |
| Vibrio | parahaemolyticus | MAVP-90 | 295-302 |
| Vibrio | parahaemolyticus | MAVP-46 | 303-308 |
| Pseudoalteromonas | nigrifaciens | KMM 661 | 309-316 |
| Pseudoalteromonas | arctica | MelAa3 | 317-322 |
| | | | and |
| | | | 1303-1308 |
| Pseudoalteromonas | sp. | GutCa3 | 323-328 |
| | | | and |
| | | | 1743-1748 |
| Vibrio | lentus | 10N.286.46.A10 | 329-334 |
| Vibrio | lentus | 10N.261.45.E12 | 335-340 |
| Vibrio | lentus | 10N.261.46.A1 | 341-346 |
| Vibrio | lentus | 10N.261.51.F9 | 347-352 |
| Vibrio | vulnificus | 162 | 353-358 |
| Vibrio | vulnificus | 32 | 359-364 |
| Vibrio | sp. | E4404 | 365-367 |
| Klebsiella | oxytoca | 67 | 368-373 |
| Aeromonas | salmonicida | AJ83 | 374-379 |
| Vibrio | penaeicida | CAIM 285 | 380-386 |
| Vibrio | crassostreae | 16BF1_95 | 387-392 |
| Vibrio | crassostreae | 30_P_66 | 393-397 |
| Vibrio | kanaloae | 10N.261.48.E7 | 398-403 |
| Vibrio | cholerae | A12JL4W4 | 404-411 |
| Vibrio | cholerae | A120618Z1 | 412-417 |
| Marinomonas | polaris | DSM 16579 | 418-424 |
| Pseudoalteromonas | sp. | JB197 | 425-432 |
| Photobacterium | damselae | NCTC11646 | 433-439 |
| Pseudoalteromonas | nigrifaciens | NCTC10691 | 440-447 |
| Vibrio | vulnificus | A14 | 448-454 |
| Vibrio | vulnificus | 95-8-7 | 455-461 |
| Vibrio | parahaemolyticus | UCM-V493 | 462-467 |
| Vibrio | splendidus | FF_139 | 468-480 |
| Vibrio | splendidus | FF_139 | 468-480 |
| Vibrio | lentus | 10N.261.52.F1 | 481-486 |
| Vibrio | lentus | 10N.286.51.F12 | 487-492 |
| Vibrio | cyclitrophicus | 10N.286.54.E5 | 493-498 |
| Vibrio | crassostreae | 34_P_122 | 499-503 |
| Oleiphilus | messinensis | DSM 13489 | 504-518 |
| Pseudoalteromonas | sp. | JB197 | 425-432 |
| Vibrio | azureus | LC2-005 | 519-525 |
| Vibrio | splendidus | 10N.286.52.C6 | 526-531 |
| Vibrio | splendidus | 10N.261.46.B10 | 532-537 |
| Vibrio | sp. | EJY3 | 538-542 |
| Vibrio | cyclitrophicus | 1F97 | 543-547 |
| Photobacterium | phosphoreum | FS-1.2 | 548-554 |
| Vibrio | tapetis | — | 555-560 |
| Vibrio | anguillarum | NCTC12159 | 561-566 |
| Vibrio | sp. | 10N.261.45.A1 | 567-574 |
| Vibrio | sp. | 10N.261.45.A6 | 575-582 |
| Vibrio | lentus | 10N.261.48.C12 | 583-588 |
| Vibrio | breoganii | 10N.261.48.E3 | 589-595 |
| Photobacterium | leiognathi | ajapo.3.1 | 596-601 |
| Halomonas | sp. | Soap Lake #6 | 602-609 |
| Pseudoalteromonas | sp. | S1727 | 610-615 |
| Pseudoalteromonas | sp. | S558 | 616-622 |
| Vibrio | sp. | BEI176 | 623-635 |
| Vibrio | alginolyticus | 12G01 | 636-641 |
| Pseudoalteromonas | sp. | P1-11 | 642-650 |
| Pseudoalteromonas | sp. | P1-25 | 651-657 |
| Photobacterium | aquae | CGMCC 1.12159 | 658-667 |
| Photobacterium | ganghwense | DSM 22954 | 668-674 |
| Vibrio | vulnificus | VA-WGS-18042 | 675-680 |
| Vibrio | cholerae | P7-CHT61-04 | 681-687 |
| Vibrio | cholerae | A12JL36W17 | 688-693 |
| Pseudoalteromonas | sp. | — | 694-701 |
| Vibrio | parahaemolyticus | CFSAN007440 | 702-707 |
| Vibrio | navarrensis | ATCC 51183 | 708-715 |
| Vibrio | parahaemolyticus | 9.5357 | 716-721 |
| Vibrio | parahaemolyticus | 856038 | 722-727 |
| Vibrio | parahaemolyticus | MAVP-E | 728-735 |
| Vibrio | toranzoniae | Vb 10.8 | 736-739 |
| Vibrio | parahaemolyticus | 926501 | 740-747 |
| Shewanella | sp. | UCD-FRSSP16_17 | 748-754 |
| Vibrio | parahaemolyticus | GCSL_R146 | 755-760 |
| Halomonas | sp. | Soap Lake #7 | 761-768 |
| Vibrio | parahaemolyticus | MAVP-Q | 769-776 |
| Aeromonas | salmonicida | S44 | 777-781 |
| Vibrio | parahaemolyticus | G6928 | 782-789 |
| Vibrio | parahaemolyticus | MAVP-R | 790-797 |
| Vibrio | cholerae | OYP8C06 | 798-803 |
| Vibrio | cholerae | OYP8F12 | 804-809 |
| Vibrio | sp. | dhg | 810-815 |
| Vibrio | cholerae | N2808 | 816-822 |
| Vibrio | parahaemolyticus | CFSAN018753 | 823-827 |
| Vibrio | parahaemolyticus | CDC_K5073 | 828-833 |
| Pseudoalteromonas | issachenkonii | KCTC 12958 | 834-839 |
| Vibrio | natriegens | ATCC 14048 | 255-839 |
| Vibrio | fluvialis | NCTC11327 | 840-843 |
| Vibrio | parahaemolyticus | VP2007-095 | 844-851 |
| Aliivibrio | fischeri | ZF-211 | 852-853 |
| Vibrio | cholerae | YB4H02 | 854-859 |
| Vibrio | cholerae | OYP2C05 | 860-866 |
| Vibrio | cholerae | A110926W4 | 867-875 |
| Vibrio | vulnificus | BAA87 | 876-881 |
| Vibrio | splendidus | ZS_82 | 882-887 |
| Photobacterium | sanguinicancri | ME15 | 888-893 |
| Vibrio | cholerae | Drakes2013 | 894-900 |
| Shewanella | baltica | OS223 | 901-905 |
| Vibrio | sp. | 16 | 906-911 |
| Vibrio | sp. | HI00D65 | 912-917 |
| Vibrio | parahaemolyticus | CFSAN018752 | 918-922 |
| Vibrio | breoganii | 10N.286.49.E9 | 923-929 |
| Vibrio | lentus | 10N.286.51.C2 | 930-935 |
| Vibrio | sp. | 10N.261.46.E8 | 936-943 |
| Vibrio | crassostreae | 31_O_69 | 944-948 |
| Pseudoalteromonas | sp. | S1688 | 949-955 |
| Vibrio | parahaemolyticus | CFSAN007439 | 956-961 |
| Vibrio | parahaemolyticus | CFSAN007432 | 962-969 |
| Vibrio | parahaemolyticus | CFSAN007429 | 970-977 |
| Vibrio | cidicii | 2423-01 | 978-986 |
| Pseudoalteromonas | luteoviolacea | NCIMB 1942 | 987-995 |
| Aliivibrio | fischeri | 5F33 | 996-998 |
| Vibrio | parahaemolyticus | GCSL_R145 | 999-1004 |
| Vibrio | vulnificus | DAL-79087 | 1005-1012 |
| Vibrio | parahaemolyticus | MAVP-P | 1013-1020 |
| Vibrio | parahaemolyticus | MAVP-L | 1021-1028 |
| Vibrio | parahaemolyticus | MAVP30 | 1029-1036 |
| Vibrio | parahaemolyticus | MAVP75 | 1037-1044 |
| Vibrio | parahaemolyticus | MA561 | 1045-1052 |
| Vibrio | parahaemolyticus | MAVP-94 | 1053-1060 |
| Pseudoalteromonas | sp. | A757 | 1061-1070 |
| Vibrio | toranzoniae | CECT 7225 | 1071-1074 |
| Vibrio | cholerae | A12JL4W81 | 1075-1080 |
| Vibrio | vulnificus | VV9-09 | 1081-1086 |
| Vibrionales | bacterium | C3R12 | 1087-1092 |
| Vibrio | crassostreae | 43_P_280 | 1093-1098 |
| Vibrio | kanaloae | 10N.286.45.A9 | 1099-1104 |
| Enterovibrio | coralii | CAIM 912 | 1105-1111 |
| Vibrio | sp. | 2521-89 | 1112-1118 |
| Vibrio | diazotrophicus | 65.10M | 1119-1121 |
| Vibrio | vulnificus | 95-8-161 | 1122-1128 |
| Aeromonas | veronii | ML09-123 | 1129-1134 |
| Vibrio | vulnificus | VA-WGS-18036 | 1135-1140 |
| Vibrio | parahaemolyticus | B6_4 | 1141-1148 |
| Vibrio | sinaloensis | AD048 | 1149-1154 |
| Vibrio | vulnificus | Vv002 | 1155-1160 |
| Vibrio | alginolyticus | UCD-30C | 1161-1166 |
| Vibrio | crassostreae | J2-9 | 1167-1171 |
| Vibrio | splendidus | 10N.286.45.A10 | 1172-1177 |
| Vibrio | campbellii | ABR2-13 | 1178-1185 |
| Photobacterium | damselae | NCTC11648 | 1186-1192 |
| Vibrio | anguillarum | DSM 21597 | 1193-1198 |
| Vibrio | cyclitrophicus | 10N.286.54.C7 | 1199-1204 |
| Vibrio | lentus | 10N.286.49.C5 | 1205-1210 |
| Vibrio | lentus | 10N.261.48.B11 | 1211-1216 |
| Vibrio | diazotrophicus | 60.6F | 1217-1220 |
| Vibrio | crassostreae | LGP107 | 1221-1226 |
| Pseudoalteromonas | translucida | KMM 520 | 1227-1232 |
| Vibrio | coralliilyticus | AIC-7 | 1233-1240 |
| Vibrio | tasmaniensis | 10N.261.52.A6 | 1241-1246 |
| Vibrio | lentus | 10N.261.52.C5 | 1247-1252 |
| Vibrio | crassostreae | 26_O_11 | 1253-1258 |
| Vibrio | crassostreae | 38_P_219 | 1259-1264 |
| Vibrio | crassostreae | 30_P_64 | 1265-1269 |
| Shewanella | sp. | ANA-3 | 1270-1277 |
| Vibrio | sp. | 10N.286.45.B6 | 1278-1285 |
| Pseudoalteromonas | arctica | A 37-1-2 | 1286-1293 |
| Vibrio | natriegens | ATCC 14048 | 255-1293 |
| Photobacterium | kishitanii | GCSL-P50 | 1294-1302 |
| Pseudoalteromonas | arctica | MelAa3 | 317-322 |
| | | | and |
| | | | 1303-1308 |
| Pseudoalteromonas | sp. | GutCa3 | 323-328 |
| | | | and |
| | | | 1743-1748 |
| Vibrio | splendidus | 10N.222.46.B1 | 1309-1316 |
| Vibrio | breoganii | 10N.222.51.B10 | 1317-1321 |
| Enterovibrio | norvegicus | 10N.261.45.A10 | 1322-1329 |
| Photobacterium | kishitanii | DSMZ 2167 | 1330-1338 |
| Photobacterium | kishitanii | calba.1.1 | 1339-1347 |
| Vibrio | splendidus | ZS_185 | 1348-1353 |
| Vibrio | breoganii | 10N.222.46.E5 | 1354-1359 |
| Pseudoalteromonas | sp. | S4498 | 1360-1365 |
| Vibrio | crassostreae | J5-15 | 1366-1371 |
| Photobacterium | leiognathi | Res.4.1 | 1372-1381 |
| Vibrio | cholerae | YB4G06 | 1382-1387 |
| Vibrio | lentus | 10N.261.45.C3 | 1388-1393 |
| Pseudoalteromonas | sp. | S4389 | 1394-1401 |
| Photobacterium | sp. | BEI 247 | 1402-1407 |
| Enterovibrio | sp. | CAIM 600 | 1408-1417 |
| Vibrio | parahaemolyticus | CDC-AM50933 | 1418-1423 |
| Shewanella | putrefaciens | NCTC10695 | 1424-1430 |
| Vibrio | azureus | NBRC 104587 | 1431-1437 |
| Vibrio | parahaemolyticus | A4EZ703 | 1438-1443 |
| Photobacterium | proteolyticum | 13-12 | 1444-1449 |
| Vibrio | cholerae | OYPIG01 | 1450-1457 |
| Pseudoalteromonas | sp. | SW0106-04 | 1458-1467 |
| Parashewanella | spongiae | KCTC 22492 | 1468-1476 |
| Photobacterium | angustum | S14 | 1477-1483 |
| Vibrio | breoganii | ZF-29 | 1484-1489 |
| Vibrio | cholerae | 09_113 | 1490-1496 |
| Pseudoalteromonas | sp. | SCSIO_11900 | 1497-1504 |
| Aliivibrio | fischeri | MJ11 | 1505-1507 |
| Vibrionales | bacterium | SWAT-3 | 1508-1513 |
| Pseudoalteromonas | sp. | BSi20495 | 1514-1520 |
| Vibrio | parahaemolyticus | CFSAN007436 | 1521-1528 |
| Vibrio | parahaemolyticus | CFSAN007431 | 1529-1536 |
| Vibrio | parahaemolyticus | CFSAN007430 | 1537-1544 |
| Vibrio | parahaemolyticus | CFSAN007433 | 1545-1552 |
| Vibrio | parahaemolyticus | CFSAN007434 | 1553-1560 |
| Vibrio | vulnificus | 491771 | 1561-1566 |
| Vibrio | diabolicus | V2 | 1567-1572 |
| Vibrio | sp. | J2-3 | 1573-1578 |
| Vibrio | parahaemolyticus | S487-4 | 1579-1586 |
| Vibrio | cholerae | YB2G01 | 1587-1592 |
| Vibrio | harveyi | FDAARGOS_106 | 1593-1600 |
| Vibrio | anguillarum | 90-11-286 | 1601-1606 |
| Vibrio | parahaemolyticus | — | 1607-1614 |
| Aliivibrio | sp. | 1S175 | 1615-1616 |
| Vibrio | parahaemolyticus | KVp10 | 1617-1622 |
| Vibrio | parahaemolyticus | CDC_K4762 | 1623-1629 |
| Vibrio | parahaemolyticus | CDC_K5582 | 1630-1637 |
| Vibrio | mimicus | SCCF01 | 1638-1643 |
| Oceanospirillum | linum | ATCC 11336 | 1644-1658 |
| Vibrio | campbellii | ATCC 25920, | 1659-1664 |
| | | CAIM 519T | |
| Vibrio | parahaemolyticus | MAVP-A | 1665-1672 |
| Vibrio | parahaemolyticus | MAVP-T | 1673-1680 |
| Vibrio | parahaemolyticus | MAVP39 | 1681-1688 |
| Vibrio | parahaemolyticus | MAVP74 | 1689-1696 |
| Vibrio | parahaemolyticus | G149 | 1697-1704 |
| Vibrio | parahaemolyticus | MAVP-109 | 1705-1712 |
| Vibrio | parahaemolyticus | MEVP12 | 1713-1720 |
| Vibrio | parahaemolyticus | CTVP31C | 1721-1728 |
| Vibrio | parahaemolyticus | CTVP27C | 1729-1736 |
| Pseudoalteromonas | issachenkonii | KMM 3549 | 1737-1742 |
| Pseudoalteromonas | sp. | GutCa3 | 323-328 |
| | | | and |
| | | | 1743-1748 |
| Vibrio | lentus | 10N.286.45.C8 | 1749-1754 |
| Vibrio | lentus | 10N.286.51.B9 | 1755-1760 |
| Vibrio | breoganii | 10N.222.49.A5 | 1761-1765 |
| Vibrio | sp. | 10N.261.46.F12 | 1766-1773 |
| Vibrio | sp. | 10N.261.49.E11 | 1774-1781 |
| Photobacterium | damselae | 940804-1/1 | 1782-1787 |
| Photobacterium | ganghwense | JCM 12487 | 1788-1797 |
| Vibrio | splendidus | ZS_173 | 1798-1803 |
| Vibrio | cholerae | 3523-03 | 1804-1811 |
| Vibrio | cholerae | 20000 | 1812-1818 |
| Vibrio | crassostreae | 29_O_38 | 1819-1824 |
| Vibrio | crassostreae | 16BF1_56 | 1825-1830 |
| Psychromonas | sp. | RZ5 | 1831-1836 |
| Pseudoalteromonas | sp. | S983 | 1837-1843 |
| Vibrio | parahaemolyticus | E1_5 | 1844-1849 |
| Pseudoalteromonas | luteoviolacea | H2 | 1850-1855 |
| Vibrio | cholerae | A110621W3 | 1856-1863 |
| Neptunomonas | qingdaonensis | CGMCC 1.10971 | 1864-1871 |

[0121] CRISPR I—F3 system elements, e.g. proteins or nucleic acid sequences encoding such proteins may be derived from any one of the organisms as set forth in Table A or Table B. In some embodiments, the I—F3 system is a I-F3b system and the proteins or elements of the I-F3b system are derived or obtained from an organism in Table A. Organisms that are listed in both Table A and Table B may be excluded from the Table B list, to the extent they express a non-I-F3b system that may function only with conventional guide RNAs. In general, it is considered, and as further described below, that I-F3a systems primarily use attachment sites adjacent to the yciA and guaC (IMPDH) genes. I-F3b elements are primarily found in an attachment site downstream of the ffs gene encoding the RNA component of the signal recognition particle and a minor branch with elements residing downstream of the rsmJ gene.

TABLE B
Organisms with IF-3a systems.

| | | | SEQ ID |
|---|---|---|---|
| Genus | species | strain | NOS |
| Vibrio | parahaemolyticus | CFSAN007436 | 1872-1878 |
| Vibrio | parahaemolyticus | CFSAN007462 | 1879-1885 |
| Vibrio | parahaemolyticus | CFSAN006131 | 1886-1892 |
| Vibrio | parahaemolyticus | CFSAN007458 | 1893-1899 |
| Vibrio | parahaemolyticus | CFSAN007435 | 1900-1906 |
| Vibrio | parahaemolyticus | CFSAN007454 | 1907-1913 |
| Vibrio | parahaemolyticus | EN9701173 | 1914-1920 |
| Vibrio | parahaemolyticus | EN9901310 | 1921-1927 |
| Vibrio | parahaemolyticus | 856769 | 1928-1934 |
| Vibrio | parahaemolyticus | 867361 | 1935-1941 |
| Vibrio | parahaemolyticus | 858960 | 1942-1949 |
| Vibrio | parahaemolyticus | HS-13-1 | 1950-1956 |
| Vibrio | parahaemolyticus | S499-7 | 1957-1963 |
| Vibrio | parahaemolyticus | FDAARGOS_120 | 1964-1970 |
| Vibrio | parahaemolyticus | A4EZ927 | 1971-1978 |
| Vibrio | parahaemolyticus | A4EZ724 | 1979-1985 |
| Vibrio | parahaemolyticus | A2EZ614 | 1986-1992 |
| Vibrio | parahaemolyticus | A2EZ743 | 1993-1999 |
| Vibrio | parahaemolyticus | A2EZ523 | 2000-2006 |
| Vibrio | parahaemolyticus | A3EZ634 | 2007-2013 |
| Vibrio | parahaemolyticus | 106744 | 2014-2021 |
| Vibrio | parahaemolyticus | A5Z273 | 2022-2029 |
| Vibrio | parahaemolyticus | CFSAN025067 | 2030-2038 |
| Vibrio | parahaemolyticus | CFSAN025068 | 2039-2047 |
| Vibrio | parahaemolyticus | CFSAN025058 | 2048-2056 |
| Vibrio | parahaemolyticus | CFSAN025061 | 2057-2065 |
| Vibrio | parahaemolyticus | GCSL_R26 | 2066-2072 |
| Vibrio | parahaemolyticus | GCSL_R75 | 2073-2079 |
| Vibrio | parahaemolyticus | GCSL_R145 | 2080-2086 |
| Vibrio | parahaemolyticus | CDC_K5428 | 2087-2093 |
| Vibrio | parahaemolyticus | CDC_K5328 | 2094-2100 |
| Vibrio | parahaemolyticus | CDC_K5010G | 2101-2108 |
| Vibrio | parahaemolyticus | CDC_K5010W | 2109-2116 |
| Vibrio | parahaemolyticus | CDC_K5439 | 2117-2124 |
| Vibrio | parahaemolyticus | CDC_K5457 | 2125-2131 |
| Vibrio | parahaemolyticus | CAIM 1772 | 2132-2138 |
| Vibrio | parahaemolyticus | PMA11.14 | 2139-2146 |
| Vibrio | parahaemolyticus | PMA32.14 | 2147-2154 |
| Vibrio | parahaemolyticus | 09-3216_1 | 2155-2161 |
| Vibrio | parahaemolyticus | HS-13-1_1 | 2162-2168 |
| Vibrio | parahaemolyticus | CFSAN001598 | 2169-2175 |
| Vibrio | parahaemolyticus | CFSAN018768 | 2176-2182 |
| Vibrio | parahaemolyticus | CFSAN018774 | 2183-2189 |
| Vibrio | parahaemolyticus | CFSAN018777 | 2190-2196 |
| Vibrio | parahaemolyticus | MAVP4 | 2197-2203 |
| Vibrio | parahaemolyticus | MAVP78 | 2204-2210 |
| Vibrio | parahaemolyticus | MAVP-94 | 2211-2217 |
| Vibrio | parahaemolyticus | MEVP12 | 2218-2224 |
| Vibrio | anguillarum | VIB43 | 2225-2227 |
| Vibrio | diazotrophicus | 60.18M | 2228-2236 |
| Vibrio | diazotrophicus | 65.7M | 2237-2243 |
| Photobacterium | iliopiscarium | NCIMB 13478 | 2244-2252 |
| Photobacterium | iliopiscarium | NCIMB 13355 | 2253-2266 |
| Vibrio | parahaemolyticus | FORC_071 | 2267-2274 |
| Vibrio | parahaemolyticus | Vp46 | 2275-2281 |
| Vibrio | parahaemolyticus | G1_3 | 2282-2289 |
| Vibrio | parahaemolyticus | S175 | 2290-2297 |
| Vibrio | parahaemolyticus | F3_1 | 2298-2305 |
| Vibrio | parahaemolyticus | B4_5 | 2306-2312 |
| Vibrio | parahaemolyticus | VP130064 | 2313-2320 |
| Vibrio | parahaemolyticus | VP161109 | 2321-2329 |
| Vibrio | parahaemolyticus | VP161504 | 2330-2337 |
| Vibrio | parahaemolyticus | VP150615 | 2338-2345 |
| Vibrio | parahaemolyticus | HZ17-083 | 2346-2353 |
| Vibrio | parahaemolyticus | HZ17-018 | 2354-2360 |
| Vibrio | parahaemolyticus | VPCR-2010 | 2361-2368 |
| Vibrio | parahaemolyticus | SBR10290 | 2369-2375 |
| Vibrio | parahaemolyticus | CFSAN007443 | 2376-2386 |
| Vibrio | parahaemolyticus | CFSAN007445 | 2387-2393 |
| Vibrio | parahaemolyticus | CFSAN007430 | 2394-2400 |
| Vibrio | parahaemolyticus | CFSAN007432 | 2401-2407 |
| Vibrio | parahaemolyticus | CFSAN001613 | 2408-2414 |
| Vibrio | parahaemolyticus | CFSAN007449 | 2415-2422 |
| Vibrio | parahaemolyticus | 846 | 2423-2429 |
| Vibrio | parahaemolyticus | VP551 | 2430-2437 |
| Vibrio | parahaemolyticus | 877952 | 2438-2444 |
| Vibrio | parahaemolyticus | 1934965 | 2445-2451 |
| Vibrio | parahaemolyticus | 389167 | 2452-2460 |
| Vibrio | parahaemolyticus | 08-0278 | 2461-2468 |
| Vibrio | parahaemolyticus | MAVP-V | 2469-2475 |
| Vibrio | parahaemolyticus | PMA37.5 | 2476-2483 |
| Vibrio | parahaemolyticus | ATC210 | 2484-2491 |
| Vibrio | fluvialis | FDAARGOS_104 | 2492-2499 |
| Vibrio | parahaemolyticus | H11523 | 2500-2506 |
| Vibrio | parahaemolyticus | A0EZ664 | 2507-2513 |
| Vibrio | parahaemolyticus | F1419 | 2514-2520 |
| Vibrio | parahaemolyticus | 482000 | 2521-2527 |
| Vibrio | parahaemolyticus | C144 | 2528-2534 |
| Vibrio | parahaemolyticus | 1056404 | 2535-2541 |
| Vibrio | parahaemolyticus | A4EZ964 | 2542-2548 |
| Vibrio | parahaemolyticus | 237500 | 2549-2555 |
| Vibrio | parahaemolyticus | CFSAN029656 | 2556-2564 |
| Vibrio | parahaemolyticus | CFSAN025054 | 2565-2573 |
| Vibrio | parahaemolyticus | CFSAN001174 | 2574-2580 |
| Vibrio | parahaemolyticus | CFSAN018763 | 2581-2587 |
| Vibrio | parahaemolyticus | GCSL_R47 | 2588-2594 |
| Vibrio | parahaemolyticus | GCSL_R51 | 2595-2601 |
| Vibrio | parahaemolyticus | GCSL_R131 | 2602-2608 |
| Vibrio | parahaemolyticus | GCSL_R136 | 2609-2615 |
| Vibrio | parahaemolyticus | CDC_K5324W | 2616-2622 |
| Vibrio | parahaemolyticus | CDC_K5308 | 2623-2629 |
| Vibrio | parahaemolyticus | CDC_K4639W | 2630-2636 |
| Vibrio | parahaemolyticus | CDC_K4639G | 2637-2643 |
| Vibrio | parahaemolyticus | CDC_K5276 | 2644-2650 |
| Vibrio | parahaemolyticus | CDC_K5582 | 2651-2657 |
| Vibrio | parahaemolyticus | CDC_K5618 | 2658-2664 |
| Vibrio | parahaemolyticus | GCSL_R130 | 2665-2671 |
| Vibrio | parahaemolyticus | CFSAN026729 | 2672-2678 |
| Vibrio | parahaemolyticus | CFSAN001615 | 2679-2685 |
| Vibrio | parahaemolyticus | CFSAN001604 | 2686-2692 |
| Vibrio | parahaemolyticus | CFSAN018769 | 2693-2699 |
| Vibrio | parahaemolyticus | CFSAN018775 | 2700-2706 |
| Vibrio | parahaemolyticus | MAVP-A | 2707-2713 |
| Vibrio | parahaemolyticus | MAVP-P | 2714-2720 |
| Vibrio | parahaemolyticus | MAVP30 | 2721-2727 |
| Vibrio | parahaemolyticus | MAVP-90 | 2728-2734 |
| Vibrio | parahaemolyticus | MAVP-50 | 2735-2741 |
| Vibrio | parahaemolyticus | CDC-AM43539 | 2742-2748 |
| Vibrio | lentus | 10N.286.46.B8 | 2749-2756 |
| Vibrio | cyclitrophicus | 10N.261.55.A11 | 2757-2759 |
| Photobacterium | sp. | GB-72 | 2760-2766 |
| Photobacterium | leiognathi | ATCC 25521 | 2767-2775 |
| Vibrio | sp. | 10N.222.48.A9 | 2776-2778 |
| Vibrio | parahaemolyticus | G1_6 | 2779-2786 |
| Vibrio | parahaemolyticus | F3_7 | 2787-2794 |
| Vibrio | parahaemolyticus | F2_9 | 2795-2802 |
| Vibrio | parahaemolyticus | E3_10 | 2803-2809 |
| Vibrio | parahaemolyticus | D7_4 | 2810-2816 |
| Vibrio | parahaemolyticus | VP090004 | 2817-2824 |
| Vibrio | parahaemolyticus | VP170075 | 2825-2832 |
| Vibrio | parahaemolyticus | VP161603 | 2833-2840 |
| Vibrio | parahaemolyticus | VP162180 | 2841-2848 |
| Vibrio | parahaemolyticus | HZ13-088 | 2849-2856 |
| Vibrio | parahaemolyticus | HZ02-J7 | 2857-2864 |
| Vibrio | parahaemolyticus | AQ3810 | 2865-2872 |
| Vibrio | parahaemolyticus | 10290 | 2873-2879 |
| Vibrio | parahaemolyticus | 50 | 2880-2886 |
| Vibrio | parahaemolyticus | S089 | 2887-2894 |
| Vibrio | parahaemolyticus | F3_4 | 2895-2902 |
| Vibrio | parahaemolyticus | F2_7 | 2903-2910 |
| Vibrio | parahaemolyticus | C2_1 | 2911-2917 |
| Vibrio | parahaemolyticus | VP080007 | 2918-2925 |
| Vibrio | parahaemolyticus | VP140095 | 2926-2933 |
| Vibrio | parahaemolyticus | VP160744 | 2934-2941 |
| Vibrio | parahaemolyticus | VP161602 | 2942-2949 |
| Vibrio | parahaemolyticus | HZ16-338 | 2950-2957 |
| Vibrio | parahaemolyticus | EKP-021 | 2958-2965 |
| Vibrio | parahaemolyticus | VP161904 | 2966-2973 |
| Vibrio | campbellii | ABR2-13 | 2974-2981 |
| Vibrio | rotiferianus | CAIM 577 | 2982-2988 |
| Vibrio | cyclitrophicus | 10N.286.55.F1 | 2989-2995 |
| Photobacterium | leiognathi | PL-721 | 2996-3003 |
| Vibrio | parahaemolyticus | S176 | 3004-3010 |
| Vibrio | parahaemolyticus | AQ3810 | 2865-2872 |
| Vibrio | cholerae | FORC_076 | 3011-3020 |
| Vibrio | parahaemolyticus | O3:K6 substr. RIMD | 3021-3028 |
| | | 2210633 | |
| Vibrio | parahaemolyticus | CFSAN001617 | 3029-3035 |
| Vibrio | parahaemolyticus | CFSAN007456 | 3036-3042 |
| Vibrio | parahaemolyticus | CFSAN007429 | 3043-3049 |
| Vibrio | parahaemolyticus | CFSAN007433 | 3050-3056 |
| Vibrio | parahaemolyticus | CFSAN001620 | 3057-3063 |
| Vibrio | parahaemolyticus | CFSAN006132 | 3064-3070 |
| Vibrio | parahaemolyticus | 863 | 3071-3078 |
| Vibrio | parahaemolyticus | EN9701121 | 3079-3085 |
| Vibrio | parahaemolyticus | 857499 | 3086-3092 |
| Vibrio | parahaemolyticus | 855308 | 3093-3099 |
| Vibrio | parahaemolyticus | 04-1290 | 3100-3106 |
| Vibrio | parahaemolyticus | 07-1339 | 3107-3114 |
| Vibrio | parahaemolyticus | FDAARGOS_52 | 3115-3121 |
| Vibrio | parahaemolyticus | S383-6 | 3122-3128 |
| Vibrio | parahaemolyticus | S440-7 | 3129-3135 |
| Vibrio | parahaemolyticus | ATC220 | 3136-3143 |
| Vibrio | parahaemolyticus | S372-5 | 3144-3150 |
| Vibrio | parahaemolyticus | A4EZ700 | 3151-3157 |
| Vibrio | parahaemolyticus | A1EZ919 | 3158-3164 |
| Vibrio | parahaemolyticus | 926501 | 3165-3171 |
| Vibrio | parahaemolyticus | A2EZ715 | 3172-3178 |
| Vibrio | parahaemolyticus | F63267 | 3179-3186 |
| Vibrio | parahaemolyticus | A3EZ710 | 3187-3193 |
| Vibrio | parahaemolyticus | A3EZ936 | 3194-3200 |
| Vibrio | parahaemolyticus | C147 | 3201-3207 |
| Vibrio | parahaemolyticus | C140 | 3208-3216 |
| Vibrio | parahaemolyticus | A5Z924 | 3217-3223 |
| Vibrio | parahaemolyticus | CFSAN025065 | 3224-3232 |
| Vibrio | parahaemolyticus | CFSAN025059 | 3233-3241 |
| Vibrio | parahaemolyticus | CFSAN025053 | 3242-3250 |
| Vibrio | anguillarum | 90-11-286 | 3251-3257 |
| Vibrio | parahaemolyticus | — | 3258-3264 |
| Vibrio | parahaemolyticus | Klin | 3265-3272 |
| Vibrio | parahaemolyticus | GCSL_R31 | 3273-3279 |
| Vibrio | parahaemolyticus | GCSL_R146 | 3280-3286 |
| Vibrio | parahaemolyticus | GCSL_R150 | 3287-3293 |
| Vibrio | parahaemolyticus | CDC_K5281 | 3294-3300 |
| Vibrio | parahaemolyticus | CDC_K4764D | 3301-3307 |
| Vibrio | parahaemolyticus | CDC_K5331 | 3308-3315 |
| Vibrio | parahaemolyticus | CDC_K5512 | 3316-3322 |
| Vibrio | parahaemolyticus | CDC_K5638 | 3323-3329 |
| Vibrio | parahaemolyticus | GIMxtfL61-2011.05 | 3330-3337 |
| Vibrio | parahaemolyticus | GIMxtfL65-2011.05 | 3338-3345 |
| Vibrio | parahaemolyticus | PMC53.7 | 3346-3352 |
| Vibrio | parahaemolyticus | PMA31.14 | 3353-3360 |
| Vibrio | parahaemolyticus | CFSAN026730 | 3361-3367 |
| Vibrio | vulnificus | VN-0206 | 3368-3374 |
| Vibrio | parahaemolyticus | FDAARGOS_191 | 3375-3382 |
| Vibrio | parahaemolyticus | Vp230 | 3383-3385 |
| Vibrio | parahaemolyticus | CFSAN001605 | 3386-3392 |
| Vibrio | parahaemolyticus | CFSAN001597 | 3393-3399 |
| Vibrio | parahaemolyticus | CFSAN022334 | 3400-3406 |
| Vibrio | parahaemolyticus | CFSAN022335 | 3407-3413 |
| Vibrio | parahaemolyticus | MAVP-T | 3414-3420 |
| Vibrio | parahaemolyticus | MAVP74 | 3421-3427 |
| Vibrio | mediterranei | QT6D1 | 3428-3434 |
| Vibrio | parahaemolyticus | MAVP-71 | 3435-3441 |
| Vibrio | parahaemolyticus | CTVP31C | 3442-3448 |
| Vibrio | parahaemolyticus | L70 | 3449-3456 |
| Vibrio | mediterranei | 117-T6 | 3457-3463 |
| Vibrio | cholerae | N2822 | 3464-3472 |
| Vibrio | parahaemolyticus | MAVP-109 | 3473-3479 |
| Vibrio | parahaemolyticus | CFSAN018753 | 3480-3486 |
| Vibrio | parahaemolyticus | GCSL_R87 | 3487-3493 |
| Vibrio | parahaemolyticus | GCSL_R88 | 3494-3500 |
| Vibrio | parahaemolyticus | CDC_K4636 | 3501-3507 |
| Vibrio | parahaemolyticus | CDC_K4637G | 3508-3515 |
| Vibrio | parahaemolyticus | CDC_K5073 | 3516-3522 |
| Vibrio | parahaemolyticus | 3259 | 3523-3530 |
| Vibrio | parahaemolyticus | 12310 | 3531-3537 |
| Vibrio | parahaemolyticus | EKP-008 | 3538-3545 |
| Vibrio | parahaemolyticus | CFSAN001612 | 3546-3552 |
| Vibrio | fluvialis | NCTC11327 | 3553-3560 |
| Vibrio | parahaemolyticus | EKP-028 | 3561-3568 |
| Vibrio | parahaemolyticus | EKP-026 | 3569-3576 |
| Vibrio | parahaemolyticus | HS-06-05 | 3577-3583 |
| Vibrio | parahaemolyticus | MAVP-112 | 3584-3590 |
| Vibrio | parahaemolyticus | Vp5 | 3591-3597 |
| Vibrio | alginolyticus | V1 | 3598-3604 |
| Vibrio | parahaemolyticus | CT4287 | 3605-3611 |
| Vibrio | anguillarum | JLL237 | 3612-3618 |
| Vibrio | parahaemolyticus | VP170801 | 3619-3626 |
| Vibrio | parahaemolyticus | Gxw_9143 | 3627-3634 |
| Vibrio | parahaemolyticus | CFSAN018752 | 3635-3641 |
| Vibrio | owensii | 1700302 | 3642-3648 |
| Photobacterium | piscicola | type strain: NCCB | 3649-3656 |
| | | 100098 | |
| Vibrio | parahaemolyticus | CFSAN025055 | 3657-3665 |
| Vibrio | parahaemolyticus | GCSL_R137 | 3666-3672 |
| Vibrio | parahaemolyticus | CFSAN001621 | 3673-3679 |
| Vibrio | parahaemolyticus | AN-5034 | 3680-3687 |
| Vibrio | parahaemolyticus | CFSAN006130 | 3688-3694 |
| Vibrio | parahaemolyticus | CFSAN007461 | 3695-3701 |
| Vibrio | parahaemolyticus | CFSAN007442 | 3702-3708 |
| Vibrio | parahaemolyticus | CFSAN007431 | 3709-3715 |
| Vibrio | parahaemolyticus | CFSAN007434 | 3716-3722 |
| Vibrio | parahaemolyticus | CFSAN001618 | 3723-3729 |
| Vibrio | parahaemolyticus | K1203 | 3730-3736 |
| Vibrio | parahaemolyticus | CFSAN007450 | 3737-3744 |
| Vibrio | parahaemolyticus | CFSAN006133 | 3745-3751 |
| Vibrio | parahaemolyticus | 97-10290 | 3752-3758 |
| Vibrio | parahaemolyticus | 3324 | 3759-3765 |
| Vibrio | parahaemolyticus | EN2910 | 3766-3772 |
| Vibrio | parahaemolyticus | 3644 | 3773-3779 |
| Vibrio | parahaemolyticus | 874301 | 3780-3786 |
| Vibrio | parahaemolyticus | 857865 | 3787-3793 |
| Vibrio | parahaemolyticus | 855673 | 3794-3800 |
| Vibrio | parahaemolyticus | 237135 | 3801-3808 |
| Vibrio | parahaemolyticus | 481270 | 3809-3815 |
| Vibrio | parahaemolyticus | 237865 | 3816-3823 |
| Vibrio | parahaemolyticus | 872109 | 3824-3830 |
| Vibrio | parahaemolyticus | MAVP-E | 3831-3837 |
| Vibrio | parahaemolyticus | FDAARGOS_51 | 3838-3844 |
| Vibrio | parahaemolyticus | S448-16 | 3845-3851 |
| Vibrio | parahaemolyticus | S487-4 | 3852-3858 |
| Vibrio | parahaemolyticus | PMC58.5 | 3859-3866 |
| Vibrio | parahaemolyticus | PMC14.7 | 3867-3874 |
| Vibrio | parahaemolyticus | K23 | 3875-3881 |
| Vibrio | parahaemolyticus | M59787 | 3882-3888 |
| Vibrio | parahaemolyticus | H64024 | 3889-3895 |
| Vibrio | parahaemolyticus | F4395 | 3896-3902 |
| Vibrio | parahaemolyticus | A3EZ136 | 3903-3910 |
| Vibrio | parahaemolyticus | T8994 | 3911-3917 |
| Vibrio | parahaemolyticus | 388802 | 3918-3925 |
| Vibrio | parahaemolyticus | A0EZ383 | 3926-3933 |
| Vibrio | parahaemolyticus | A3EZ770 | 3934-3940 |
| Vibrio | parahaemolyticus | A1EZ952 | 3941-3947 |
| Vibrio | parahaemolyticus | C146 | 3948-3954 |
| Vibrio | parahaemolyticus | A5Z652 | 3955-3961 |
| Vibrio | parahaemolyticus | A5Z860 | 3962-3968 |
| Vibrio | parahaemolyticus | A5Z878 | 3969-3975 |
| Vibrio | parahaemolyticus | CFSAN025063 | 3976-3984 |
| Vibrio | parahaemolyticus | CFSAN029653 | 3985-3993 |
| Vibrio | parahaemolyticus | CFSAN025064 | 3994-4002 |
| Vibrio | parahaemolyticus | CFSAN025056 | 4003-4011 |
| Vibrio | parahaemolyticus | CFSAN018767 | 4012-4018 |
| Vibrio | parahaemolyticus | GCSL_R10 | 4019-4025 |
| Vibrio | parahaemolyticus | GCSL_R16 | 4026-4032 |
| Vibrio | parahaemolyticus | GCSL_R33 | 4033-4043 |
| Vibrio | parahaemolyticus | GCSL_R76 | 4044-4050 |
| Vibrio | parahaemolyticus | GCSL_R144 | 4051-4057 |
| Vibrio | parahaemolyticus | CDC_K5433 | 4058-4064 |
| Vibrio | parahaemolyticus | CDC_K5306 | 4065-4071 |
| Vibrio | parahaemolyticus | CDC_K5429 | 4072-4078 |
| Vibrio | parahaemolyticus | CDC_K4558G | 4079-4081 |
| Vibrio | parahaemolyticus | CDC_K4763 | 4082-4088 |
| Vibrio | parahaemolyticus | CDC_K4775 | 4089-4096 |
| Vibrio | parahaemolyticus | CDC_K5058 | 4097-4104 |
| Vibrio | parahaemolyticus | CDC_K5278 | 4105-4111 |
| Vibrio | parahaemolyticus | CDC_K5345G | 4112-4118 |
| Vibrio | parahaemolyticus | CDC_K5456 | 4119-4125 |
| Vibrio | parahaemolyticus | CDC_K5528 | 4126-4133 |
| Vibrio | parahaemolyticus | CDC_K5620 | 4134-4140 |
| Vibrio | cholerae | VC22 | 4141-4143 |
| Vibrio | parahaemolyticus | GIMxtfL71-2011.05 | 4144-4150 |
| Vibrio | parahaemolyticus | PMA21.14 | 4151-4158 |
| Vibrio | parahaemolyticus | CFSAN001616 | 4159-4165 |
| Vibrio | parahaemolyticus | HS-13-1_100 | 4166-4172 |
| Vibrio | parahaemolyticus | Vp47 | 4173-4179 |
| Vibrio | parahaemolyticus | CFSAN001603 | 4180-4186 |
| Vibrio | parahaemolyticus | CFSAN001608 | 4187-4193 |
| Vibrio | parahaemolyticus | CFSAN001602 | 4194-4200 |
| Vibrio | parahaemolyticus | CFSAN001600 | 4201-4207 |
| Vibrio | parahaemolyticus | CFSAN018770 | 4208-4214 |
| Vibrio | parahaemolyticus | CFSAN022330 | 4215-4221 |
| Vibrio | parahaemolyticus | CFSAN022331 | 4222-4228 |
| Vibrio | parahaemolyticus | CFSAN022336 | 4229-4235 |
| Vibrio | parahaemolyticus | MAVP39 | 4236-4242 |
| Vibrio | parahaemolyticus | MAVP-Q | 4243-4249 |
| Vibrio | parahaemolyticus | G3578 | 4250-4256 |
| Vibrio | parahaemolyticus | MEVP14 | 4257-4263 |
| Vibrio | parahaemolyticus | CTVP34C | 4264-4270 |
| Vibrio | parahaemolyticus | CTVP27C | 4271-4277 |
| Vibrio | parahaemolyticus | VPD14 | 4278-4285 |
| Vibrio | parahaemolyticus | B-265 | 4286-4293 |
| Vibrio | parahaemolyticus | GCSL_R125 | 4294-4300 |
| Vibrio | parahaemolyticus | CDC_K4637W | 4301-4308 |
| Vibrio | cholerae | N2797 | 4309-4317 |
| Vibrio | parahaemolyticus | CDC_K5125 | 4318-4325 |
| Vibrio | parahaemolyticus | CFSAN001595 | 4326-4333 |
| Vibrio | parahaemolyticus | 09-3216_100 | 4334-4340 |
| Vibrio | natriegens | CCUG 16374 | 4341-4350 |
| Vibrio | parahaemolyticus | HZ18-100 | 4351-4359 |
| Vibrio | parahaemolyticus | CFSAN006135 | 4360-4366 |
| Vibrio | parahaemolyticus | ISF-01-07 | 4367-4374 |
| Vibrio | parahaemolyticus | ISF-25-6 | 4375-4382 |
| Vibrio | parahaemolyticus | CFSAN018757 | 4383-4390 |
| Vibrio | parahaemolyticus | PMA37.5 | 2476-2483 |
| Vibrio | parahaemolyticus | MAVP-14 | 4391-4397 |
| Vibrio | diabolicus | FDAARGOS_105 | 4398-4404 |
| Vibrio | parahaemolyticus | S107 | 4405-4412 |
| Vibrio | parahaemolyticus | S061 | 4413-4420 |
| Vibrio | parahaemolyticus | G2_2 | 4421-4428 |
| Vibrio | parahaemolyticus | G1_10 | 4429-4436 |
| Vibrio | parahaemolyticus | F8_5 | 4437-4443 |
| Vibrio | parahaemolyticus | F3_10 | 4444-4451 |
| Vibrio | parahaemolyticus | F3_3 | 4452-4459 |
| Vibrio | parahaemolyticus | F3_8 | 4460-4467 |
| Vibrio | parahaemolyticus | F2_10 | 4468-4475 |
| Vibrio | parahaemolyticus | E1_9 | 4476-4483 |
| Vibrio | parahaemolyticus | VP120036 | 4484-4491 |
| Vibrio | parahaemolyticus | VP150244 | 4492-4499 |
| Vibrio | parahaemolyticus | VP100044 | 4500-4507 |
| Vibrio | parahaemolyticus | VP160675 | 4508-4516 |
| Vibrio | parahaemolyticus | VP160483 | 4517-4524 |
| Vibrio | parahaemolyticus | VP140355 | 4525-4532 |
| Vibrio | parahaemolyticus | VP161902 | 4533-4540 |
| Vibrio | parahaemolyticus | HZ16-515 | 4541-4548 |
| Vibrio | parahaemolyticus | HZ15-046 | 4549-4556 |
| Vibrio | parahaemolyticus | HZ14-002 | 4557-4565 |
| Vibrio | parahaemolyticus | HZ13-043 | 4566-4573 |
| Vibrio | cholerae | N2825 | 4574-4583 |
| Vibrio | parahaemolyticus | VP161168 | 4584-4591 |
| Vibrio | parahaemolyticus | FDAARGOS_53 | 4592-4598 |
| Vibrio | cyclitrophicus | ZF99 | 4599-4605 |
| Vibrio | tasmaniensis | 10N.261.51.E11 | 4606-4612 |
| Vibrio | parahaemolyticus | 3256 | 4613-4619 |
| Photobacterium | iliopiscarium | ATCC 51760 | 4620-4633 |
| Vibrio | sp. | PID23_8 | 4634-4642 |
| Vibrio | parahaemolyticus | NIHCB0603 | 4643-4650 |
| Vibrio | parahaemolyticus | 949 | 4651-4658 |
| Vibrio | parahaemolyticus | VP2007-095 | 4659-4665 |
| Vibrio | parahaemolyticus | VP232 | 4666-4673 |
| Vibrio | parahaemolyticus | Peru-288 | 4674-4681 |
| Vibrio | parahaemolyticus | 861 | 4682-4689 |
| Vibrio | parahaemolyticus | V14/01 | 4690-4697 |
| Vibrio | parahaemolyticus | V-223/04 | 4698-4707 |
| Vibrio | parahaemolyticus | 10296 | 4708-4714 |
| Vibrio | parahaemolyticus | NCTC10884 | 4715-4722 |
| Vibrio | parahaemolyticus | FDA_R31 | 4723-4729 |
| Vibrio | parahaemolyticus | IDH02640 | 4730-4737 |
| Vibrio | parahaemolyticus | VP-48 | 4738-4745 |
| Vibrio | parahaemolyticus | VPTS-2010 | 4746-4748 |
| Vibrio | hangzhouensis | CGMCC 1.7062 | 4749-4753 |
| Vibrio | parahaemolyticus | HZ18-062 | 4754-4761 |
| Vibrio | cholerae | HE-45 | 4762-4771 |
| Vibrio | sp. | LJC006 | 4772-4779 |
| Vibrio | sp. | 10N.286.46.E4 | 4780-4787 |
| Vibrio | parahaemolyticus | 605 | 4788-4795 |
| Vibrio | anguillarum | J360 | 4796-4798 |
| Vibrio | parahaemolyticus | Peru-466 | 4799-4806 |
| Vibrio | parahaemolyticus | K5030 | 4807-4814 |
| Vibrio | parahaemolyticus | BB22OP | 4815-4822 |
| Vibrio | parahaemolyticus | VP250 | 4823-4830 |
| Vibrio | parahaemolyticus | IDH02189 | 4831-4838 |
| Vibrio | parahaemolyticus | CFSAN007460 | 4839-4845 |
| Vibrio | parahaemolyticus | CFSAN001611 | 4846-4852 |
| Vibrio | parahaemolyticus | CFSAN006129 | 4853-4859 |
| Vibrio | parahaemolyticus | CFSAN001619 | 4860-4865 |
| Vibrio | parahaemolyticus | 98-513-F52 | 4866-4872 |
| Vibrio | parahaemolyticus | CFSAN007451 | 4873-4880 |
| Vibrio | parahaemolyticus | CFSAN001614 | 4881-4887 |
| Vibrio | parahaemolyticus | 930 | 4888-4895 |
| Vibrio | parahaemolyticus | 12315 | 4896-4902 |
| Vibrio | parahaemolyticus | EN9701072 | 4903-4909 |
| Vibrio | parahaemolyticus | 876127 | 4910-4916 |
| Vibrio | parahaemolyticus | 872475 | 4917-4923 |
| Vibrio | parahaemolyticus | 857134 | 4924-4930 |
| Vibrio | parahaemolyticus | 480905 | 4931-4937 |
| Vibrio | parahaemolyticus | 926135 | 4938-4945 |
| Vibrio | parahaemolyticus | 860421 | 4946-4952 |
| Vibrio | parahaemolyticus | MAVP-45 | 4953-4959 |
| Vibrio | parahaemolyticus | S349-10 | 4960-4966 |
| Vibrio | parahaemolyticus | PMC58.7 | 4967-4974 |
| Vibrio | parahaemolyticus | PMC48 | 4975-4982 |
| Vibrio | parahaemolyticus | Gxw_7004 | 4983-4990 |
| Vibrio | parahaemolyticus | 450466 | 4991-4997 |
| Vibrio | parahaemolyticus | A0EZ608 | 4998-5004 |
| Vibrio | parahaemolyticus | A0EZ713 | 5005-5011 |
| Vibrio | parahaemolyticus | F30368 | 5012-5018 |
| Vibrio | parahaemolyticus | H18983 | 5019-5025 |
| Vibrio | parahaemolyticus | A3EZ711 | 5026-5032 |
| Vibrio | parahaemolyticus | A1EZ679 | 5033-5039 |
| Vibrio | parahaemolyticus | A3EZ799 | 5040-5046 |
| Vibrio | parahaemolyticus | C143 | 5047-5053 |
| Vibrio | parahaemolyticus | C148 | 5054-5060 |
| Vibrio | parahaemolyticus | A5Z853 | 5061-5068 |
| Vibrio | parahaemolyticus | A5Z905 | 5069-5075 |
| Vibrio | parahaemolyticus | CFSAN025062 | 5076-5084 |
| Vibrio | parahaemolyticus | CFSAN025066 | 5085-5093 |
| Vibrio | parahaemolyticus | CFSAN029654 | 5094-5102 |
| Vibrio | parahaemolyticus | CFSAN025060 | 5103-5111 |
| Vibrio | parahaemolyticus | CFSAN025052 | 5112-5120 |
| Vibrio | parahaemolyticus | CFSAN025057 | 5121-5129 |
| Vibrio | parahaemolyticus | CFSAN018754 | 5130-5137 |
| Vibrio | parahaemolyticus | GCSL_R12 | 5138-5144 |
| Vibrio | parahaemolyticus | GCSL_R30 | 5145-5151 |
| Vibrio | parahaemolyticus | GCSL_R32 | 5152-5158 |
| Vibrio | parahaemolyticus | GCSL_R57 | 5159-5167 |
| Vibrio | parahaemolyticus | GCSL_R77 | 5168-5174 |
| Vibrio | parahaemolyticus | GCSL_R138 | 5175-5181 |
| Vibrio | parahaemolyticus | GCSL_R149 | 5182-5188 |
| Vibrio | parahaemolyticus | CDC_K5324G | 5189-5195 |
| Vibrio | parahaemolyticus | CDC_K5437 | 5196-5202 |
| Vibrio | parahaemolyticus | CDC_K5280 | 5203-5209 |
| Vibrio | parahaemolyticus | CDC_K4558W | 5210-5216 |
| Vibrio | parahaemolyticus | CDC_K5009W | 5217-5224 |
| Vibrio | parahaemolyticus | CDC_K5067 | 5225-5231 |
| Vibrio | parahaemolyticus | CDC_K5346 | 5232-5238 |
| Vibrio | parahaemolyticus | CDC_K5345W | 5239-5245 |
| Vibrio | parahaemolyticus | CDC_K5579 | 5246-5252 |
| Vibrio | parahaemolyticus | CDC_K5629 | 5253-5259 |
| Vibrio | parahaemolyticus | CICESE-170 | 5260-5267 |
| Vibrio | parahaemolyticus | PMA12.14 | 5268-5275 |
| Vibrio | parahaemolyticus | VN-0293 | 5276-5282 |
| Vibrio | parahaemolyticus | xtf19 | 5283-5289 |
| Vibrio | parahaemolyticus | CFSAN001606 | 5290-5296 |
| Vibrio | parahaemolyticus | CFSAN001607 | 5297-5303 |
| Vibrio | parahaemolyticus | CFSAN001599 | 5304-5310 |
| Vibrio | parahaemolyticus | CFSAN018772 | 5311-5317 |
| Vibrio | parahaemolyticus | CFSAN018773 | 5318-5324 |
| Vibrio | parahaemolyticus | CFSAN018771 | 5325-5331 |
| Vibrio | parahaemolyticus | CFSAN022332 | 5332-5338 |
| Vibrio | parahaemolyticus | MAVP-L | 5339-5345 |
| Vibrio | parahaemolyticus | MAVP56 | 5346-5352 |
| Vibrio | parahaemolyticus | MAVP75 | 5353-5359 |
| Vibrio | anguillarum | S3 4/9 | 5360-5362 |
| Vibrio | parahaemolyticus | MAVP-46 | 5363-5369 |
| Vibrio | parahaemolyticus | MAVP-67 | 5370-5377 |
| Shewanella | sp. | 10N.286.48.A6 | 5378-5383 |
| Vibrio | lentus | 10N.261.55.E8 | 5384-5390 |
| Vibrio | diazotrophicus | 65.10M | 5391-5397 |
| Vibrio | crassostreae | 25_P_9 | 5398-5406 |
| Vibrio | parahaemolyticus | 16763 | 5407-5413 |
| Vibrio | parahaemolyticus | G1_8 | 5414-5421 |
| Vibrio | parahaemolyticus | S178 | 5422-5429 |
| Vibrio | parahaemolyticus | G1_4 | 5430-5437 |
| Vibrio | parahaemolyticus | F9_2 | 5438-5444 |
| Vibrio | parahaemolyticus | F3_9 | 5445-5452 |
| Vibrio | parahaemolyticus | F3_5 | 5453-5460 |
| Vibrio | parahaemolyticus | F3_2 | 5461-5468 |
| Vibrio | parahaemolyticus | F3_6 | 5469-5476 |
| Vibrio | parahaemolyticus | F2_8 | 5477-5484 |
| Vibrio | parahaemolyticus | VP900008 | 5485-5492 |
| Vibrio | parahaemolyticus | VP110008 | 5493-5500 |
| Vibrio | parahaemolyticus | VP840119 | 5501-5508 |
| Vibrio | parahaemolyticus | VP161407 | 5509-5516 |
| Vibrio | parahaemolyticus | VP170054 | 5517-5524 |
| Vibrio | parahaemolyticus | VP160968 | 5525-5532 |
| Vibrio | parahaemolyticus | VP830010 | 5533-5540 |
| Vibrio | parahaemolyticus | HZ13-102 | 5541-5549 |
| Photobacterium | sp. | CECT 9192 | 5550-5554 |

[0122] All of the bacteria described in Table A and Table B are accessible to those skilled in the art, as are their genomic sequences.

[0123] In embodiments, organisms that contain non-IF-3b systems are not expected to function with the described guide atypical guide RNAs, or at least it is considered that they would not exhibit enhanced transposition with the described atypical guide RNAs, which include atypical repeats and spacers from the organisms described in Table A.

[0124] In certain approaches of this disclosure expression vectors, such as plasmids, are used to produce one or more than one construct and/or component of the system, and any of their cloning steps or intermediates. A variety of suitable expression vectors known in the art can be adapted to produce components of this disclosure, including vectors that contain any desirable cargo, but in the context of other components described herein, and atypical repeats.

[0125] In embodiments, the compositions and methods of this disclosure are functional in a heterologous system. “Heterologous” as used herein means a system, e.g., a cell type, in which one or more of the components of the system are not produced without modification of the cells/system. A non-limiting embodiment of a heterologous system is any bacteria that is not Aeromonas salmonicida, including but not necessarily limited to Aeromonas salmonicida strain S44. In embodiments, a representative and non-limiting heterologous system is any type of E. coli.

[0126] In embodiments, any protein of this disclosure may be an Aeromonas salmonicida strain S44 protein, or a derivative thereof, with the exception that the TnsA protein is not produced by Aeromonas salmonicida strain S44, without modification, such as by recombinant engineering of the type described further herein. In embodiments, a described system is adapted from Aeromonas salmonicida S44 and exhibits greater transposition efficiency than a system adapted from Aeromonas hydrophila AFG_SD03.

[0127] In embodiments, the presently described systems that include gRNAs with atypical repeats and/or atypical spacers are used to direct blocks of genes to virtually any position in a bacterial genome, any episomal element, or a eukaryotic chromosome, in an orientation dependent fashion. In embodiments, the system is thus targeted to a sequence in a chromosome in a eukaryotic cell, or to a DNA extrachromosomal element in a eukaryotic cell, such as a DNA viral genome. Thus, the disclosure includes modifying eukaryotic chromosomes, and eukaryotic extrachromosomal elements. Accordingly, the type of extrachromosomal elements that can be modified according to the presently described compositions and methods are not particularly limited.

[0128] As known in the art, transposons are genetic elements that can move within a genome that appear to be found in all forms of life. In addition to the gRNAs discussed above, the present disclosure includes in part use of a version of the Tn7-like element where it has adapted the CRISPR-Cas system as a mechanism of targeting where the transposon moves, and further comprises mutations in certain Tn-related proteins that enhance CRISPR-Cas based editing using transposon proteins.

[0129] The present disclosure demonstrates that transposon and CRISPR-Cas systems can be used in cells to target insertion of the element into a single position adjacent to the match to the guide RNA in one orientation. This system has been recapitulated using recombinant approaches such that the transposon proteins and Cas proteins can be expressed in any position in the cell and they will act on the CRISPR array and transposon end-sequences found elsewhere in the cell.

[0130] Each set of genes described herein can also include a suitable xre gene that encodes a transcription regulator. Further, any of the tns genes, as further described herein, may comprise mutations such that tns genes encode proteins that are distinct from the proteins that are produced in nature, i.e., proteins that are produced by bacteria that have not been engineered to produce a modified Tns protein.

[0131] In particular, any cell of interest can be adapted to express the transposon and Cas proteins. For bacteria, this can be from an independently replicating plasmid or bacteriophage DNA or other element, or a vector that integrates into the genome, or an alternative delivery vector that is maintained or not maintained afterwards. In one embodiment, the user designs a guide RNA as described herein, such as a guide RNA that contains one, two, or more, atypical repeats, that contains a spacer that matches the sequences adjacent to the desired point of insertion. Designing guide RNAs according to this disclosure may take into account any sequence requirements that are dictated by any adjacent motifs (called PAM sequences). A sequence encoding the improved guide RNA is cloned into a delivery vector between repeats, at least one of which includes an atypical repeat (see, for example, FIGS. 3, 4, and 17).

[0132] The disclosure includes using a least one tniQ gene, and accordingly two or more different tniQ genes may be used. tniQ genes produce a TniQ protein that is an optional part of the present system. Including this gene in the construct will direct transposition event into the one specific cognate site recognized by the TniQ protein. Without intending to be bound by any particular theory, it is considered that TniQ may also interact with the CRISPR/Cas and be required for guide RNA targeting. The genes of interest that are to be delivered into the bacterial strain or other suitable cell are cloned into a multicloning site (MCS) in the delivery vector using existing standard lab techniques (FIG. 2, panel B). The MCS is located between the left (L) and right (R) synthetic transposon end-sequences. If orientation of the final insertion is important for a particular embodiment, the right end of the element will be proximal to the match to the selected guide RNA. The delivery vector can be designed as a conditional vector that will not be maintained if desired. If desired, a selectable genetic marker can also be included in this vector. If the delivery vector will not be maintained, integration of the DNA by the targeted transposition process can be directly selected. If the efficiency is high enough, then this selectable marker is not needed.

[0133] This system can also be used to inactivate any gene in a prokaryotic or eukaryotic genome. Any one of many selectable markers can be included in the delivery vector to allow inactivation of a gene targeted by the guide RNA. This type of technology is broadly applicable to engineering new bacterial strains and eukaryotic cells for industry, research and therapeutic applications.

[0134] In contrast to existing CRISPR-based editing techniques, in addition to the presently described gRNAs, one advantage of the present systems is that no separate DNA break is used; instead the DNA fragment of interest is directly joined into the genome at one position determined by the user. Thus, in an embodiment, the disclosure provides for editing a target DNA without creating a double stranded DNA break.

[0135] In non-limiting demonstrations, the disclosure supports use of guide RNAs with atypical spacers in the systems described herein, and which include recombinantly produced proteins (the Cas proteins with or without TniQ are referred to in certain instances as ‘cascade”) can specifically recognize and bind to a DNA substrate that comprises a protospacer. As used in certain examples, cascade comprises Cas8-5 (encoding fused Cas proteins), Cas7, Cas6 and a guide RNA with or without one or more TniQ proteins. This combination illustrates cascade for variant I-F systems associated with Tn7-like elements.

[0136] It is expected that the results that embodiments of the disclosure described as follows can be produced with any guide RNA that is an aspect of this disclosure, e.g., the typical 5′ end or 3′ end that forms the guide RNA can be engineered to form a sequence that is the RNA equivalent of an atypical repeat, and exhibits of enhanced activity in the resulting guide RNA. It is considered that including sequences matching atypical repeats in such guide RNAs would improve the results in the following description.

[0137] For example, as shown in the examples and figures of this disclosure, in vitro binding of cascade occurs with specificity to a DNA substrate comprising a protospacer, to which the cascade complex is directed using a suitable guide RNA, which may be adapted to use the presently provided guide RNAs with atypical repeats. Likewise, the figures and examples demonstrate copurification of a complex comprising TniQ and cascade. Thus, the disclosure shows that recombinantly produced TinQ and cascade form a physical association. Moreover, as described in the foregoing description and figures, the disclosure demonstrates functionality of the system in a living heterologous system (illustrated using E. coli). In particular, the figures, show guided transposition that is specific for a particular location in a conjugal plasmid, and that this transposition is PAM specific. In particular, in endogenous Aeromonas, the insertion was 48 base pairs from the protospacer. Thus, the disclosure demonstrates functionality of the system using recombinant approaches in living cells that do not, without modification as described herein, produce a directed transposition event. Additionally, the disclosure demonstrates transposition from one location in a chromosome to another location in the chromosome, results which are also obtained in a heterologous system, using E. coli as a representative example.

[0138] In embodiments, systems of this disclosure include a DNA cargo for insertion into a eukaryotic chromosome or extrachromosomal element, or in the case of prokaryotes, a chromosome or a plasmid. Thus, instead of transposing an existing segment of a genome in the manner in which transposons ordinarily function, the disclosure provides for insertion of DNA cargo that can be selected by the user of the system. The DNA cargo may be provided, for example, as a circular or linear DNA molecule. The DNA cargo can be introduced into the cell prior to, concurrently, or after introducing a system of the disclosure into a cell. The sequence of the DNA cargo is not particularly limited, other than a requirement for suitable right and left ends that are recognized by proteins of the system. The right and left end sequences that are required for recognition are typically from about 90-150-bp in length. As is known in the art, such 90-150 bp length comprises multiple 22 bp binding sites for the TnsB transposase in the element in each of the ends that can be overlapping or spaced.

[0139] In embodiments, the transposable DNA cargo sequence is transposed into the chromosome or extrachromosomal element within a 5 nucleotide sequence that includes the nucleotide that is located 47 nucleotides 3′ relative to the 3′ end of the protospacer. In embodiments, a DNA cargo insertion comprises an insertion at the center of a 5 bp target site duplication (TSD). Thus, by providing a guide RNA as described herein that is cognate to the protospacer, precise and PAM specific integration of a DNA cargo can be achieved. In embodiments, the PAM comprises or consists of TACC or CC or variants of NC and CN, including any of CG, CA and TC, as illustrated in non-limiting embodiments in FIG. 2b.

[0140] The transposon and Cas genes can be expressed from any of a wide variety of existing mechanism that can replicate separately in the cell or be integrated into the host cell genome. Alternatively, they could be expressed transiently from an expression system that will not be maintained. In embodiments, the proteins themselves could be directly transformed into the host strain to allow their function. The disclosure allows for multiple copies of distinct transposon gene cassettes, multiple copies of Cas genes, CRISPR arrays, and multiple distinct cargo coding sequences to be introduced and to modify genetic material in the same cell. In embodiments a first set of transposon genes tnsA, tnsB, tnsC, and optionally one or more tniQ genes, Cas genes cas8f, cas5f cas7f, and cas6f and an xre gene, and a sequence encoding at least a first guide RNA, as described herein, that is functional with proteins encoded by the Cas genes, wherein at least one of the first set of transposon genes, the Cas genes, or the sequence encoding the first guide RNA are present within and/or are encoded by a recombinant polynucleotide that is introduced into bacteria, or eukaryotic cells. The disclosure thus includes second, third, fourth, fifth, or more copies of distinct transposon genes, Cas genes, and distinct cargo coding sequences

[0141] In one example, the disclosure provides a system for modifying a genetic target in bacteria and/or eukaryotic cells. The system comprises a first set of transposon genes tnsA, tnsB, tnsC, and optionally one or more tniQ, Cas genes cas8f cas5f cas7f and cas6f, and an xre gene encoding a transcription regulator, and a sequence encoding a first guide RNA, as described herein, that is functional with proteins encoded by the Cas genes, wherein at least one of the first set of transposon genes, the Cas genes, and/or or the sequence encoding the first guide RNA are present within and/or are encoded by a recombinant polynucleotide. Without intending to be constrained by any particular theory, it is considered that the xre gene, while annotated as a transcriptional regulator, can also make transposition complexes described herein more efficient.

[0142] In embodiments, one or more of the tns genes, and therefore the proteins they encode, are modified, as described in more detail below. From this disclosure, and other information known to those skilled in the art, homologous proteins can be recognized, aligned, and amino acid changes in the proteins can be made such that the proteins function in a manner similar to those described herein. All such homologous proteins and mutations thereof are included in this disclosure. The disclosure also includes combinations of naturally occurring genes and proteins, with the exception that one or more of the naturally occurring sequences may be expressed from one or more recombinant vectors. In embodiments, homologous proteins are from any bacteria, including but not limited to Proteobacteria.

[0143] Certain embodiments of mutations in proteins that are included in the disclosure are provided below. The mutations can be in any one or any combination of proteins encoded by the tnsA gene, the tnsB gene, and the tnsC gene.

[0144] In embodiments, the Tns proteins that are provided by this disclosure comprise mutations relative to a wild type sequence. A “wild type” sequence as used herein means a sequence that preexists in nature without experimentally engineering a change in the sequence. In embodiments, a wild type sequence is the sequence of a transposition element, a non-limiting example of which is the sequence of Aeromonas salmonicida strain S44 plasmid pS44-1, which can be accessed via accession no. CP022176 (Version CP022176.1), such as via www.ncbi.nlm.nih.gov/nuccore/CP022176.

[0145] In embodiments, the mutations described in i), ii) and iii) below provide for an increase in transposition frequency that is similar or greater than a value obtained from a control construct. In embodiments, the control construct comprises one or more tns genes in which a mutation described herein is not present, and/or the control comprises a guide RNA with one or more segments that recognize a typical repeat, wherein the increased transposition efficiency is achieved with a guide RNA of this disclosure which includes one or more sequences that recognize atypical repeats. In embodiments, a control transposition frequency is a frequency exhibited by a transposition element from Aeromonas hydrophila strain AFG_SD03, which can be identified from Accession PUTQ01000019 (Version PUTQ01000019.1), and which comprises representative amino acid sequences described below, except for the indicated mutations. The pertinent sequence of Aeromonas hydrophila strain AFG_SD03 can be accessed via, for example, www.ncbi.nlm.nih.gov/nuccore/1427716682. The Aeromonas salmonicida Cas8/5 amino acid sequence is available under accession number ASI25653, www.ncbi.nlm.nih.gov/protein/ASI25653.1; Aeromonas salmonicida Cas7 amino acid sequence is available under accession number ASI25654, www.ncbi.nlm.nih.gov/protein/ASI25654.1; Aeromonas salmonicida Cas6 amino acid sequence is available under accession number ASI25655, www.ncbi.nlm.nih.gov/protein/ASI25655.1. In an embodiment, the control comprises a system that that is present on the Tn6677 element, as further described below.

[0146] In embodiments, assuming only for illustration, a frequency of transposition of 0.0001% is a control value because transposition efficiency was not able to be measured in the representative assays, (e.g., hypothetically only one in 100,000 cells into which a presently described system using a wild type TnsA protein experience a transposition event). In this regard, the present disclosure provides for a 1 fold to 200 fold increase in transposition efficiency, inclusive, and including all numbers and ranges of to the first decimal point there between, relative to a control frequency of transposition. In embodiments, transposition efficiency can be equated to insertion of a user supplied DNA template that is inserted into a selected location in a DNA substrate.

[0147] In embodiments, the CRISPR guide RNAs and systems provided herein effect a modification in a DNA target sequence, for example, insertion of a sequence into the DNA target sequence via transposition. The DNA target sequence may comprise a DNA cargo sequence for insertion. In some embodiments, the guide RNAs facilitates increased efficiency of the modification as compared to efficiency of modification using a control guide RNA. In some embodiments, the guide RNA is an atypical guide RNA and the modification is effected with a type I-F3b CRISPR complex as described herein, and a control guide RNA is a guide RNA not comprising a diverged repeat as herein described (e.g., a “typical” guide RNA). In some embodiments, the modification (e.g., transposition) efficiency is at least 1.5 fold greater than a control modification efficiency using a control guide RNA. In some embodiments, the modification efficiency is at least 2 fold greater than a control modification efficiency using a control guide RNA. In some embodiments, the modification efficiency is at least 4 fold greater than a control modification efficiency using a control guide RNA. In embodiments, the disclosure facilitates an increase of transposition efficiency relative to a control, such as transposition from a chromosome to a plasmid, of 1, 2, 3, 4, 5, 6, 7, 8, 9, 10, 11, 12, 13, 14, 15, 16, 17, 18, 19, 20, 21, 22, 23, 24, 25, 26, 27, 28, 29, 30, 31, 32, 33, 34, 35, 36, 37, 38, 39, 40, 41, 42, 43, 44, 45, 46, 47, 48, 49, 50, 51, 52, 53, 54, 55, 56, 57, 58, 59, 60, 61, 62, 63, 64, 65, 66, 67, 68, 69, 70, 71, 72, 73, 74, 75, 76, 77, 78, 79, 80, 81, 82, 83, 84, 85, 86, 87, 88, 89, 90, 91, 92, 93, 94, 95, 96, 97, 98, 99, 100, 101, 102, 103, 104, 105, 106, 107, 108, 109, 110, 111, 112, 113, 114, 115, 116, 117, 118, 119, 120, 121, 122, 123, 124, 125, 126, 127, 128, 129, 130, 131, 132, 133, 134, 135, 136, 137, 138, 139, 140, 141, 142, 143, 144, 145, 146, 147, 148, 149, 150, 151, 152, 153, 154, 155, 156, 157, 158, 159, 160, 161, 162, 163, 164, 165, 166, 167, 168, 169, 170, 171, 172, 173, 174, 175, 176, 177, 178, 179, 180, 181, 182, 183, 184, 185, 186, 187, 188, fold greater than a control value. Similar transposition efficiency can be determined for transposition events where the transposition comprises transposing an element in cis, e.g., transposition from one location in a chromosome to a different location in the same chromosome.

[0148] i) In one embodiment of this disclosure, the tnsA gene comprises a change in sequence such that at least one amino acid in the TnsA protein encoded by the tnsA gene is changed relative to its wild type sequence. In an embodiment, the change in the TnsA protein comprises a change of Ala at position 125 of an Aeromonas salmonicida TnsA protein, wherein optionally the change is to an Asp, or is a homologous change in a homologous TnsA protein. A representative TnsA amino acid sequence is provided below. In this regard, we have demonstrated that this construct can introduce numerous insertions, but without the change insertions approximate background levels, or are undetectable.

[0149] ii) In embodiments, the disclosure includes a tnsB gene comprising a change in sequence such that at least one amino acid in the TnsB protein encoded by the tnsB gene is changed relative to its wild type sequence. In an embodiment, the change in the TnsB protein comprises a change of amino acid position 167 of an Aeromonas salmonicida TsnB protein, wherein optionally the change is a Ser, or is a homologous change in a homologous position of a homologous TnsB protein. Representative TnsB amino acid sequences are provided below.

[0150] iii) As with the TnsA and TnsB proteins, in embodiments, the disclosure includes a modified tnsC gene that comprises a change in sequence such that at least one amino acid in the TnsC protein encoded by the tnsC gene is changed relative to its wild type sequence. In embodiments, the change is optionally located in a TnsC Walker B motif. In embodiments, the change in a Walker B motif is, for example, in position 135, 136, 137, 138, 139, or 140 of the Aeromonas salmonicida TnsC protein, a representative example of which is shown below. In one embodiment, the change is to an amino acid at position 140 in the TnsC protein, wherein, for example, amino acid 140 is change to an Ala or Gln, or a homologous change in a homologous position of a homologous TnsC protein is made.

[0151] iii) the tnsC gene comprises a change in sequence such that at least one amino acid in the TnsC protein encoded by the tnsC gene is changed relative to its wild type sequence, wherein the change is optionally in a TnsC Walker B motif.

[0152] In embodiments, any composition, system, or method of this disclosure may be performed in the absence of any TnsE transposon protein. TnsE transposon proteins are known in the art. In a non-limiting embodiment, any composition, system, and/or method of this disclosure may be performed in the absence of, and/or without participation of, an E. coli TnsE protein that comprises or consists of the following amino acid sequence:

(SEQ ID NO: 5676)
MVRLATFNDNVQVVHIGHLFRNSGHKEWRIFVWFNPMQERKWTRFTHLP
LLSRAKVVNSTTKQINKADRVIEFEASDLQRAKIIDFPNLSSFASVRNK
DGAQSSFIYEAETPYSKTRYHIPQLELARSLFLINSYFCRSCLSSTALQ
QEFDVQYEVERDHLEIRILPSSSFPKGALEQSAVVQLLVWLFSDQDVMD
SYESIFRHYQQNREIKNGVESWCFSFDPPPMQGWKLHVKGRSSNEDKDY
LVEEIVGLEINAMLPSTTAISHASFQEKEAGDGSTQHIAVSTESVVDDE
HLQLDDEETANIDTDTRVIEAEPTWISFSRPSRIEKSRRARKSSQTILE
KEEATTSENSNLVSTDEPHLGGVLAAADVGGKQDATNYNSIFANRFAAF
DELLSILKTKFACRVLFEETLVLPKVGRSRLHLCKDGSPRVIKAVGVQR
NGSEFVLLEVDASDGVKMLSTKVLSGVDSETWRNDFEKIRRGVVKSSLN
WPNSLFDQLYGQDGHRGVNHPKGLGELQVSREDMEGWAERVVREQFTH.

[0153] In embodiments, any composition, system, and/or method of this disclosure may be performed in the absence of, and/or without participation of any TnsE protein that is a homologue of the foregoing sequence, but is from a type of bacteria that is not E. coli.

[0154] Non-limiting embodiments of amino acid sequences comprising mutations and/or locations of mutations are described herein, and by way of the following amino acid sequences and accession numbers. Enlarged, bold and italicized amino acids signify non-limiting examples of mutations that are encompassed by this disclosure. Enlarged sequences are locations where other mutations may be made, and are also included in this disclosure.

[0155] TnsA (A125D) Change from Aeromonas salmonicida Strain S44 Plasmid pS44-1 or TnsA Exact from Aeromonas Hydro Hila Strain AFG_SD03

(SEQ ID NO: 5677)
MYRRHLKHSRVKNLFKFVSAKMNTVFTVESALEFDTCFHLEYSPSVKFY
EAQPEGFYYEFAGRQCPYTPDFRLVDQNDSVSFLEIKPSDKVADPDFLH
RFPLKQQRAIELSSPLKLVTEKQIRI [symbol] PILGNLKLLHRYSGFQSFTPLH
MQLLGLVQKLGRVSLLRLSDSIDAPPEEVLASALSLIARGIMQSDLTVQ
KIGISSFVWAGGHSGIDHG

[0156] TnsB (from Aeromonas salmonicida Strain S44 Plasmid S44-1)

(SEQ ID NO: 5678)
MDKHNGGLFEDEFVIPQPSTSTSPIDAIQAVLPATVDSFPYVLKVEALH
RRDYILWVEKNLAGGWTEKNLTPLLADAALVLPPPTPNWRTLARWRKIY
IQHGRKLVSLIPKHQAKGNARSRLPPSDELFFEQAVHRYLVGEQPSIAS
AFQLYSDSIRIENLGVVEN [symbol] IKTISYMAFYNRIKKLPAYQVMKSRKGSY
IADVEFKAIASHKPPSRIMERVEIDHTPLDLLLLDDDLLVPLGRPSLTL
LIDAYSHCVVGFNLNFNQPSYESVRNALLSSISKKDYVKNKYPSIEHEW
PCYGKPETLVVDNGVEFWSASLAQSCLELGINIQYNPVRKPWLKPMIER
MFGIINRKLLEPIPGKTFSNIQEKGDYDPQKDAVMRFSTFLEIFHHWVI
DVYHYEPDSRYRYIPIISWQHGNKDAPPAPIIGDDLTKLEVILSLSLHC
THRRGGIQRYHLRYDSDELASYRMNYPDQTRGKRKVLVKLNPRDISYVY
VFLEDLGSYIRVPCIDPIGYTKGLSLQEHQINVKLHRDFINEQMDVVSL
SKARIYLNDRIKNELIEVRRNIRQRNVKGVNKIAKYRNVGSHAETSIVH
ELNHPATNEVISKMESASQPEHCDDWDNFTSGLEPY

[0157] TnsB (P167S) Change from Aeromonas salmonicida Strain S44 Plasmid pS44-1

(SEQ ID NO: 5679)
MDKHNGGLFEDEFVIPQPSTSTSPIDAIQAVLPATVDSFPYVLKVEALH
RRDYILWVEKNLAGGWTEKNLTPLLADAALVLPPPTPNWRTLARWRKIY
IQHGRKLVSLIPKHQAKGNARSRLPPSDELFFEQAVHRYLVGEQPSIAS
AFQLYSDSIRIENLGVVENSIKTISYMAFYNRIKKLPAYQVMKSRKGSY
IADVEFKAIASHKPPSRIMERVEIDHTPLDLLLLDDDLLVPLGRPSLTL
LIDAYSHCVVGFNLNFNQPSYESVRNALLSSISKKDYVKNKYPSIEHEW
PCYGKPETLVVDNGVEFWSASLAQSCLELGINIQYNPVRKPWLKPMIER
MFGIINRKLLEPIPGKTFSNIQEKGDYDPQKDAVMRFSTFLEIFHHWVI
DVYHYEPDSRYRYIPIISWQHGNKDAPPAPIIGDDLTKLEVILSLSLHC
THRRGGIQRYHLRYDSDELASYRMNYPDQTRGKRKVLVKLNPRDISYVY
VFLEDLGSYIRVPCIDPIGYTKGLSLQEHQINVKLHRDFINEQMDVVSL
SKARIYLNDRIKNELIEVRRNIRQRNVKGVNKIAKYRNVGSHAETSIVH
ELNHPATNEVISKMESASQPEHCDDWDNFTSGLEPY

[0158] TnsC (from Aeromonas salmonicida Strain S44 Plasmid pS44-1)

(SEQ ID NO: 5680)
MDLSCHDADKLRSFIECYVETPLLRAIQEDFDRLRFNKQFAGEPQCMLL
TGDTGTGKSSLIRHYAAKHPEQVRHGFIHKPLLVSRIPSRPTLESTMVE
LLKDLGQFGSSDRIHKSSAESLTEALIKCLKRCETE [symbol] FQELIEN
KTREKRNQIANRLKYISETAKIPIVLVGMPWATKIAEEPQWSSRLLIRR
SIPYFKLSDDRENFIRLIMGLANRMPFETQARLETKHTIYALFAACYGS
LRALKQLLDESVKQALAAHAETLKHEHIAVAYALFYPDQVNPFLQPIDE
IKACEVKQYSRYEIDAAGKEEVLNPLQFTDKIPISQLLKKR

[0159] TnsC (E140A) Change from Aeromonas salmonicida Strain S44 Plasmid pS44-1

(SEQ ID NO: 5681)
MDLSCHDADKLRSFIECYVETPLLRAIQEDFDRLRFNKQFAGEPQCMLL
TGDTGTGKSSLIRHYAAKHPEQVRHGFIHKPLLVSRIPSRPTLESTMVE
LLKDLGQFGSSDRIHKSSAESLTEALIKCLKRCETE [symbol] FQELIEN
KTREKRNQIANRLKYISETAKIPIVLVGMPWATKIAEEPQWSSRLLIRR
SIPYFKLSDDRENFIRLIMGLANRMPFETQARLETKHTIYALFAACYGS
LRALKQLLDESVKQALAAHAETLKHEHIAVAYALFYPDQVNPFLQPIDE
IKACEVKQYSRYEIDAAGKEEVLNPLQFTDKIPISQLLKKR

[0160] TnsC (E140Q) Change from Aeromonas salmonicida Strain S44 Plasmid pS44-1

(SEQ ID NO: 5682)
MDLSCHDADKLRSFIECYVETPLLRAIQEDFDRLRFNKQFAGEPQCMLL
TGDTGTGKSSLIRHYAAKHPEQVRHGFIHKPLLVSRIPSRPTLESTMVE
LLKDLGQFGSSDRIHKSSAESLTEALIKCLKRCETE [symbol] FQELIEN
KTREKRNQIANRLKYISETAKIPIVLVGMPWATKIAEEPQWSSRLLIRR
SIPYFKLSDDRENFIRLIMGLANRMPFETQARLETKHTIYALFAACYGS
LRALKQLLDESVKQALAAHAETLKHEHIAVAYALFYPDQVNPFLQPIDE
IKACEVKQYSRYEIDAAGKEEVLNPLQFTDKIPISQLLKKR

[0161] Xre (gene 91099.91428, Locus tag CE463_00475) from Aeromonas salmonicida strain S44 plasmid pS44-1. The disclosure includes homologous Xre sequences. The sequence below is identical to the Xre protein in Aeromonas hydrophila strain AFG_SD03.

(SEQ ID NO: 5683)
MTNPLPIRLKAARKATGLTQQQLGIRLGMEQSTASARMNQYEKGKHAPD
YQTMQRIAQELGYPVAYFYCDDELLAELICMMAKLSEEKQRELLQQLSV
TEYAESRDSAE

[0162] In addition to any of the foregoing mutations, the disclosure also includes additional amino acid changes, such as changes in TnsC, which may include gain-of-activity mutations, in canonical Tn7 (e.g., homologous proteins), including but not necessarily limited to TnsABC(A225V), TnsABC(E233K), TnsABC(E233A), and TnsABC(E233Q).

[0163] In one aspect the disclosure includes a kit comprising one or more expression vector(s) that encodes one or more Cas or other enzymes described herein. The expression vector in certain approaches includes a cloning site, such as a poly-cloning site, such that any desirable cargo gene(s) can be cloned into the cloning site to be expressed in any target cell into which the system is introduced or already comprises. The kit can further comprise one or more containers, printed material providing instructions as to how to use make and/or use the expression vector to produce suitable vectors, and reagents for introducing the expression vector into cells. The kits may further comprise one or more bacterial strains for use in producing the components of the system. The bacterial strains may be provided in a composition wherein growth of the bacteria is restricted, such as a frozen culture with one or more cryoprotectants, such as glycerol. In embodiments, the kit comprises a vector for expression of a guide RNA comprising a user selected spacer. The expression vector encodes at least a portion of a guide RNA that contains at least one atypical repeat. The expression vector can be configured such that a user selected spacer can be cloned into the expression vector adjacent to at least one atypical repeat. A cloning site can be configured such that a pair of atypical repeats will flank the spacer that is cloned into the expression vector.

[0164] In another aspect the disclosure comprises delivering to cells a DNA cargo via a system of this disclosure. The method generally comprises introducing one or more polynucleotides of this disclosure, or a mixture or proteins and polynucleotides encoding the proteins, which may be also provided with RNA polynucleotides, such as the presently described guide RNAs, into one or more bacterial or eukaryotic cells, whereby the Cas and transposon enzymes/proteins are expressed and editing of the chromosome or another DNA target by a combination of the Cas enzymes and the transposon occurs.

[0165] In non-limiting embodiments, this disclosure is considered to be suitable for targeting eukaryotic cells, and any microorganism that is susceptible to editing by a system as described herein. In embodiments the microorganism comprises bacteria that are resistant to one or more antibiotics, whereby the editing by the present system kills or reduces the growth of the antibiotic-resistant bacteria, and/or the system sensitizes the bacteria to an antibiotic by, for example, use of cargo that targets an antibiotic resistance gene, which may be present on a chromosome or a plasmid. The disclosure is thus suitable for targeting bacterial chromosomes or episomal elements, e.g., plasmids. In embodiments, a modification of a bacterial chromosome or plasmid causes the bacteria to change from pathogenic to non-pathogenic.

[0166] In embodiments, bacteria are killed. In embodiments, one or all of the components of a system described herein can be provided in a pharmaceutical formulation. Thus, in embodiments, DNA, RNA, proteins, and combinations thereof can be provided in a composition that comprises at least one pharmaceutically acceptable additive.

[0167] In embodiments, the method of this disclosure is used to reduce or eradicate bacterial cells, and may be used to reduce or eradicate persister bacteria and/or dormant viable but non-culturable (VBNC) bacteria from an individual or an inanimate surface, or a food substance.

[0168] In embodiments, and as noted above, the disclosure is considered suitable for editing eukaryotic cells. In embodiments, eukaryotic cells that are modified by the approaches of this disclosure are totipotent, pluripotent, multipotent, or oligopotent stem cells when the modification is made. In embodiments, the cells are neural stem cells. In embodiments, the cells are hematopoietic stem cells. In embodiments, the cells are leukocytes. In embodiments, the leukocytes are of a myeloid or lymphoid lineage. In embodiments, the cells are embryonic stem cells, or adult stem cells. In embodiments, the cells are epidermal stem cells or epithelial stem cells. In embodiments, the cells are cancer cells, or cancer stem cells. In embodiments, the cells are differentiated cells when the modification is made. In embodiments, the cells are mammalian cells. In embodiments, the cells are human, or are non-human animal cells. In embodiments, the non-human eukaryotic cells comprise fungal, plant or insect cells. In one approach the cells are engineered to express a detectable or selectable marker, or a combination thereof.

[0169] In embodiments, the disclosure includes obtaining cells from an individual, modifying the cells ex vivo using a CRISPR system as described herein, and reintroducing the cells or their progeny into the individual for prophylaxis and/or therapy of a condition, disease or disorder, or to treat an injury, trauma or anatomical defect. In embodiments, the cells modified ex vivo as described herein are used autologously.

[0170] In embodiments, cells modified according to this disclosure are provided as cell lines. In embodiments, the cells are engineered to produce a protein or other compound, and the cells themselves or the protein or compound they produce is used for prophylactic or therapeutic applications.

[0171] In various embodiments, the modification introduced into eukaryotic cells according to this disclosure is homozygous or heterozygous. In embodiments, the modification comprises a homozygous dominant or homozygous recessive or heterozygous dominant or heterozygous recessive mutation correlated with a phenotype or condition, and is thus useful for modeling such phenotype or condition. In embodiments a modification causes a malignant cell to revert to a non-malignant phenotype.

[0172] In certain aspects the disclosure includes a pharmaceutical formulation comprising one or more components of a system described herein. A pharmaceutical formulation comprises one or more pharmaceutically acceptable additives, many of which are known in the art. In some embodiments, the pharmaceutical compositions comprise a pharmaceutically acceptable carrier suitable for administration to humans. In some embodiments, the pharmaceutical compositions comprise a pharmaceutically acceptable carrier suitable for intraocular injection. In some embodiments, the pharmaceutical compositions comprise a pharmaceutically acceptable carrier suitable for topical application. In some embodiments, the pharmaceutical compositions comprise a pharmaceutically acceptable carrier suitable for intravenous injection. In some embodiments, the pharmaceutical compositions comprise and a pharmaceutically acceptable carrier suitable for injection into arteries. In some embodiments, the pharmaceutical composition is suitable for oral or topical administration. All of the described routes of administration are encompassed by the disclosure.

[0173] In embodiments, expression vectors, proteins, RNPs, polynucleotides, and combinations thereof, can be provided as pharmaceutical formulations. A pharmaceutical formulation can be prepared by mixing the described components with any suitable pharmaceutical additive, buffer, and the like. Examples of pharmaceutically acceptable carriers, excipients and stabilizers can be found, for example, in Remington: The Science and Practice ofPharmacy (2005) 21st Edition, Philadelphia, Pa. Lippincott Williams & Wilkins, the disclosure of which is incorporated herein by reference. Further, any of a variety of therapeutic delivery agents can be used, and include but are not limited to nanoparticles, lipid nanoparticle (LNP), exosomes, and the like. In embodiments, a biodegradable material can be used. In embodiments, poly(lactide-co-galactide) (PLGA) is a representative biodegradable material. In embodiments, any biodegradable material, including but not necessarily limited to biodegrable polymers. As an alternative to PLGA, the biodegradable material can comprise poly(glycolide) (PGA), poly(L-lactide) (PLA), or poly(beta-amino esters). In embodiments, the biodegradable material may be a hydrogel, an alginate, or a collagen. In an embodiment the biodegradable material can comprise a polyester a polyamide, or polyethylene glycol (PEG). In embodiments, lipid-stabilized micro and nanoparticles can be used.

[0174] In certain approaches, compositions of this disclosure, including the described systems, and cells modified using the described systems, are used for treatment of condition or disorder in an individual in need thereof. The term “treatment” as used herein refers to alleviation of one or more symptoms or features associated with the presence of the particular condition or suspected condition being treated. Treatment does not necessarily mean complete cure or remission, nor does it preclude recurrence or relapses. Treatment can be effected over a short term, over a medium term, or can be a long-term treatment, such as, within the context of a maintenance therapy. Treatment can be continuous or intermittent.

[0175] In embodiments, a system of this disclosure is administered to an individual in a therapeutically effective amount. In embodiments, a therapeutically effective amount of a composition of this disclosure is used. The term “therapeutically effective amount” as used herein refers to an amount of an agent sufficient to achieve, in a single or multiple doses, the intended purpose of treatment. The amount desired or required will vary depending on the particular compound or composition used, its mode of administration, patient specifics and the like. Appropriate effective amounts can be determined by one of ordinary skill in the art informed by the instant disclosure using routine experimentation. For example, a therapeutically effective amount, e.g., a dose, can be estimated initially either in cell culture assays or in animal models. An animal model can also be used to determine a suitable concentration range, and route of administration. Such information can then be used to determine useful doses and routes for administration in humans, or to non-human animals. A precise dosage can be selected by in view of the patient to be treated. Dosage and administration can be adjusted to provide sufficient levels of components to achieve a desired effect, such as a modification in a threshold number of cells. Additional factors which may be taken into account include the particular gene or other genetic element involved, the type of condition, the age, weight and gender of the patient, desired duration of treatment, method of administration, time and frequency of administration, drug combination(s), reaction sensitivities, and tolerance/response to therapy. In certain embodiments, a therapeutically effective amount is an amount that reduces one or more signs or symptoms of a disease, and/or reduces the severity of the disease. A therapeutically effective amount may also inhibit or prevent the onset of a disease, or a disease relapse. In embodiments, cells modified according to this disclosure are administered to an individual in need thereof in a therapeutically effective amount.

[0176] In embodiments, the disclosure comprises providing a treatment to an individual in need thereof by introducing a therapeutically effective amount a composition of this disclosure, or modified cells as described herein to the individual, wherein the cells comprising the DNA insertion treats, alleviates, inhibits, or prevents the formation of one or more conditions, diseases, or disorders. In embodiments, the cells are first obtained from the individual, modified according to this disclosure, and transplanted back into the individual. In embodiments, allogenic cells can be used. In embodiments, the modified eukaryotic cells can be provided in a pharmaceutical formulation, and such formulations are included in the disclosure.

[0177] In embodiments, a described system of this disclosure is introduced into one or more prokaryotic or eukaryotic cells. In embodiments, the prokaryotic cells comprise or consist of gram positive, or gram negative bacteria. The bacteria may be non-pathogenic, or pathogenic. In embodiments, a described system is introduced into prokaryotic cells (e.g., bacterial or archaeal cells) in the context of a host, e.g., a human, animal, or plant host, e.g., the bacteria are a component of a host's microbiome or are an abnormal component of a microbiome, e.g., a pathogen. In some embodiments, delivery of a system described herein results in the stable formation of a recombinant microorganism. In some embodiments, a recombinant microorganism as generated by a system described herein results in the production of an enzyme or metabolite that can alter the health or metabolism of a host, e.g., a human host. In some embodiments, delivery of a system described herein results in the inactivation of virulence determinants of a microorganism, e.g., antibiotic resistance or toxin production. In some embodiments, delivery of a system described herein results in killing of the recipient cell. The system may kill some or all of the cells, or render the cells non-pathogenic and/or sensitive to one or more antibiotics. In embodiments, the bacteria are used as a component of a food or beverage product, including but not limited to fermented food and beverages, and dairy products. In embodiments, such bacteria comprise Lactic acid bacteria. In embodiments, selective delivery to a specific type of bacteria is used by way of a bacteriophage or packaged phagemids that can express all or some of the described components, but wherein the bacteriophage exhibits a specific tropism for a particular type of bacteria. In some embodiments, a delivery vehicle provides only partial specificity towards targeting particular cells, and additional specificity is provided by the choice of DNA sequence being targeted.

[0178] In embodiments, the described systems are introduced into eukaryotic cells. Such cells include but are not necessarily limited to animal cells, fungi such as yeasts, protists, algae, and plant cells.

[0179] In embodiments, the disclosure provides one or more cells, wherein DNA in the cells comprises at least one inserted DNA insertion template. The described cells may be any prokaryotic or eukaryotic cells. Accordingly, the disclosure also provides one or more cells that comprise an inserted DNA sequence.

[0180] In embodiments, the eukaryotic cells comprise animal cells, which may comprise mammalian or avian cells, or insect cells. In embodiments, the mammalian cells are human or non-human mammalian cells. In embodiments, compositions of this disclosure are administered to avian animals, or to a canine, a feline, an equine animal, or to cattle, including but not limited to dairy cattle.

[0181] In embodiments, the cells that are modified by the approaches of this disclosure are totipotent, pluripotent, multipotent, or oligopotent stem cells when the modification is made. In embodiments, the cells are neural stem cells. In embodiments, the cells are hematopoietic stem cells. In embodiments, the cells are leukocytes. In embodiments, the leukocytes are of a myeloid or lymphoid lineage. In embodiments, the cells are embryonic stem cells, or adult stem cells. In embodiments, the cells are epidermal stem cells or epithelial stem cells. In embodiments, the cells are cancer cells, or cancer stem cells. In embodiments, the cells are differentiated cells when the modification is made.

[0182] In embodiments, the disclosure includes obtaining cells from an individual, modifying the cells ex vivo using a system as described herein, and reintroducing the cells or their progeny into the individual or a immunologically matched individual for prophylaxis and/or therapy of a condition, disease or disorder, or to treat an injury, trauma or anatomical defect. In embodiments, the cells modified ex vivo as described herein are autologous cells. In embodiments, the cells are provided as cell lines. In embodiments, the cells are engineered to produce a protein or other compound, and the cells themselves and/or the protein or compound they produce is used for prophylactic or therapeutic applications.

[0183] In embodiments, eukaryotic cells made according to this disclosure can be used to create transgenic, non-human organisms.

[0184] In embodiments, one or more modified cells according to this disclosure may be used to perform a gene-drive in a population of animals, including but not necessarily limited to insects.

[0185] In embodiments, the one or more cells into which a described system is introduced comprises a plant cell. The term “plant cell” as used herein refers to protoplasts, gamete producing cells, and includes cells which regenerate into whole plants. Plant cells include but are not necessarily limited to cells obtained from or found in: seeds, suspension cultures, embryos, meristematic regions, callus tissue, leaves, roots, shoots, gametophytes, sporophytes, pollen, and microspores. Plant cells can also be understood to include modified cells, such as protoplasts, obtained from the aforementioned tissues. Plant products made according to the disclosure are included.

[0186] In embodiments, the disclosure provides an article of manufacture, which may comprise a kit. In embodiments, the article of manufacture may comprise one or more cloning vectors. The one or more cloning vectors may encode any one or combination of proteins and polynucleotides described herein. The cloning vectors may be adapted to include, for example, a multiple cloning site (MCS), into which a sequence encoding any protein or polynucleotide, such as any desired targeting RNA, may be introduced. An article of manufacture may include one or more sealed containers that contain any of the aforementioned components, and may further comprise packaging and/or printed material. The printed material may provide information on the contents of the article, and may provide instructions or other indication of how the contents of the article may be used. In an embodiment, the printed material provides an indication of a disease or disorder that is to be treated using the contents of the article.

[0187] In embodiments, when polynucleotides are delivered, they may comprise modified polynucleotides or other modifications, such as phosphate backbone modifications, and modified nucleotides, such as nucleotide analogs. Suitable modifications and methods for making nucleic acid analogs are known in the art. Some examples include but are not limited to polynucleotides which comprise modified ribonucleotides or deoxyribonucleotides. For example, modified ribonucleotides may comprise methylations and/or substitutions of the 2′ position of the ribose moiety with an —O— lower alkyl group containing 1-6 saturated or unsaturated carbon atoms, or with an —O-aryl group having 2-6 carbon atoms, wherein such alkyl or aryl group may be unsubstituted or may be substituted, e.g., with halo, hydroxy, trifluoromethyl, cyano, nitro, acyl, acyloxy, alkoxy, carboxyl, carbalkoxyl, or amino groups; or with a hydroxy, an amino or a halo group. In embodiments modified nucleotides comprise methyl-cytidine and/or pseudo-uridine. The nucleotides may be linked by phosphodiester linkages or by a synthetic linkage, i.e., a linkage other than a phosphodiester linkage. Examples of inter-nucleoside linkages in the polynucleotide agents that can be used in the disclosure include, but are not limited to, phosphodiester, alkylphosphonate, phosphorothioate, phosphorodithioate, phosphate ester, alkylphosphonothioate, phosphoramidate, carbamate, carbonate, morpholino, phosphate triester, acetamidate, carboxymethyl ester, or combinations thereof. In embodiments, the DNA analog may be a peptide nucleic acid (PNA).

[0188] The following description and Examples are intended to illustrate but not limited the disclosure.

[0189] The description and Examples illustrate that Tn7-CRISPR-Cas elements evolved a system of guide RNA categorization to accomplish a two-pathway lifestyle. Multiple mechanisms allow functionally distinct guide RNAs for transposition, a conventional system capable of acquiring guide RNAs to new plasmid and phage targets and a second providing long-term memory for access to chromosomal sites upon entry into a new host. Guide RNAs are privatized to be recognized only by the transposon-adapted system via sequence-specialization, mismatch tolerance and selective regulation to avoid toxic self-targeting by endogenous CRISPR-Cas defense systems. This description and the Examples therefore support the foregoing approaches to engineering guide RNAs for enhanced CRISPR-Cas functionality for genome modification.

[0190] The present disclosure provides, among other aspects, bioinformatic analysis of I—F3 Tn7-CRISPR-Cas elements and reveals mechanisms that allowed the evolution of guide RNA-directed transposition involving categorization of guide RNAs. The disclosure illustrates that I—F3 Tn7-CRISPR-Cas insertion events are explained by guide RNAs encoded in CRISPR arrays within the element. A form of curation allows the I—F3 elements to maintain different classes of guide RNAs to mirror the two-pathway lifestyle found with prototypic Tn7, but with a guide-RNA-only system. Guide RNA-directed transposition into the chromosome occurs via CRISPR arrays that are under the control of a specialized transcriptional regulation system that directs pathway choice or using an atypical CRISPR repeat structure that allows the guide RNA to be private to the Tn7-CRISPR-Cas transposon, which can be exploited for genome modification, as described above. Guide RNAs encoded by the elements that recognize the chromosome also have mismatches that are tolerated for directing transposition, but not for interference by a canonical I-F1 system. The guide RNA attributes found in I—F3 Tn7-CRISPR-Cas elements help explain how they interact with related type I-F CRISPR-Cas systems, such as the ability to tolerate self-targeting guide RNAs that would otherwise cause canonical CRISPR-Cas systems to degrade the host chromosome. The disclosure takes advantage of these discoveries as described above to provide improved approaches to DNA editing, and as illustrated in the following Examples.

### Example 1

### I—F3 Tn7-CRISPR-Cas Element Targeting is Explained by Spacers in Atypical CRISPR Array Configurations

[0191] We conducted a bioinformatics analysis of the I—F3 family of Tn7-CRISPR-Cas elements. An analysis of over 53,000 genomes from gamma proteobacteria identified 802 Tn7-like elements that encode the type I—F3 CRISPR-Cas system found in two branches (FIG. 1). One branch, I-F3a, primarily uses attachment sites adjacent to the yciA and guaC (IMPDH) genes. Elements in a second branch, I-F3b, are primarily found in an attachment site downstream of the ffs gene encoding the RNA component of the signal recognition particle and a minor branch with elements residing downstream of the rsmJ gene. As part of this analysis we reexamined CRISPR arrays and made a striking finding that altered our understanding of how transposition is targeted across all of the I—F3 elements. The disclosure demonstrates, without intending to be bound by any particular theory, that the insertion position of all elements can be explained by guide RNA-directed transposition; essentially all of the I—F3 elements include a spacer within element-encoded CRISPR arrays that matches a region ˜48 bp from the right end of the element (FIGS. 1, 2a, and 2b), and as illustrated in the sequence listing. In each of these cases the spacer in the array matches the same protospacer in the yciA, guaC, ffs, or rsmJ genes (FIG. 2b). In addition to being at one of the ends of the gene to direct transposition just outside the reading frame, the spacers matching the yciA, guaC, and rsmJ genes are all found in the same reading frame register that aligns the variable wobble position of the codons with every sixth position in the guide RNA, a position known to flip out and not required to match the protospacer (Fineran et al., 2014; Jackson et al., 2014; Mulepati et al., 2014; Zhao et al., 2014). Around six percent of Tn7-CRISPR-Cas insertions identified in bacterial genomes are not located in one of the four major att sites. However, even with the insertions outside the major att sites we could still identify a spacer in the array that was specific to a protospacer ˜48 bp from the right end of the element (FIG. 1).

[0192] The spacers that recognize each one of the four major att sites are located in a specific position in the element-encoded CRISPR array(s). There are trends with this position and the configuration of the CRISPR arrays that differed in the two major branches of I—F3 elements. In the branch of I-F3a elements, the spacer that matched the yciA or guaC att sites was located after a 70-90 bp gap in the array found immediately downstream of the tniQ, cas8/5, cas7, cas6 operon (FIGS. 2a and 2c)(see below). In these cases where the CRISPR array was not contiguous it was not clear if the array was transcribed as a single pre-crRNA and/or if all of the spacers were capable of being matured into functional guide RNA complexes (addressed below). In the I-F3b branch of elements that recognizes att sites associated with the ffs and rsmJ genes the att-site specific spacer tended to be found in the single CRISPR array located downstream of the tniQ-cas operon, but always as the last spacer in the array (FIGS. 1 and 2a).

[0193] Only one transposition event was identified in a plasmid rather than in the chromosome in our analysis. The Tn7-CRISPR-Cas element in Aeromonas salmonicida S44, Tn6900, was on a large plasmid (pS44-1) that is predicted to be mobile based on the presence of genes with known roles in conjugal DNA transfer (tra genes). Transposition into the site on the plasmid could still be explained by a guide RNA encoded in the array, however, in this case the spacer was at the leader-proximal position in the array (FIG. 8a-c). Interestingly, a near-identical Tn7-CRISPR-Cas element, Tn6899, found in the ffs att site in Aeromonas hydrophila AFG_SD03 (Boehmer et al., 2018) had a spacer that recognized the same plasmid-encoded gene, but at a different position (FIG. 8b-c), suggesting a possible plasmid vector important for the dispersal of these elements within Aeromonas.

[0194] In addition to their distinct position in the CRISPR array, the att spacers were flanked by repeats with novel sequences. New spacers are added to a CRISPR array at the leader-proximal end of the array in a process that duplicates the leader-proximal repeat (Xiao et al., 2017). Therefore, although repeats can diverge over time, the first and second repeats start out identical in CRISPR arrays. In I—F3 Tn7-CRISPR-Cas elements the terminal spacer that was used for guide RNA-directed transposition into the chromosome was invariably flanked by repeats that were highly diverged from the leader-proximal repeat (FIG. 2c and the sequence listing). As discussed above, the present disclosure refers to the diverged repeats as “atypical” repeats, and a guide RNA formed from these sequences atypical guide RNAs.

### Example 2

### Highly Diverged Atypical Repeat-Spacer Units Form Functional Guide RNA Complexes

[0195] To analyze the unique nature of the CRISPR array structure found in I—F3 Tn7-CRISPR-Cas elements we established guide RNA-directed transposition in a heterologous and genetically tractable system, E. coli. Elements identified in a plasmid in Aeromonas salmonicida S44 and in the ffs attachment site in Aeromonas hydrophila AFG_SD03 were of particular interest because they were near-identical, but found in different species at distinct insertion points suggesting they were functional recently (FIG. 8a). For the transposition (Tns) and Cas proteins we utilized a coding sequence configuration we predicted to be active for transposition by looking for consensus across multiple elements found in Aeromonas.

[0196] Previous studies trying to establish Tn7-CRISPR-Cas transposition in a heterologous host relied heavily on indirect PCR-based techniques to assess transposition, techniques that are vulnerable to artifacts (Rice et al., 2020; Strecker et al., 2020). To develop a more complete picture of Tn7-CRISPR-Cas transposition, we used an assay that monitored full transposition events. A mini Tn7-CRISPR-Cas element was situated in the chromosome, the donor site for transposition in the described assays, constructed with cis-acting transposon end-sequences predicted by putative TnsB-binding sites (Peters, 2014) flanking an antibiotic resistance determinant. In this assay, candidate transposition targets resided on a conjugal F plasmid. After inducing expression of the components of the guide RNA-directed transposition system, full transposition events were detected by mating the conjugal plasmid into a tester strain and screening for the antibiotic resistance gene in the mini transposon (FIG. 9a). The tnsABC, tniQ-cas8/5, 7, 6, and the CRISPR array were expressed from three separate expression vectors.

[0197] Initially we analyzed candidate guide RNAs produced from the wild-type configuration of the CRISPR array found in Tn6900 in A. salmonicida 544. In this configuration the leader-proximal spacer was a perfect match to a mobile plasmid-encoded gene from the native host and the second/terminal spacer had a degenerate match to the ffs protospacer with 10 mismatches (FIG. 3a, 8c). Some of the mismatches between the spacer and the protospacer in the target were at every sixth position and therefore would not impact recognition of the ffs guide RNA target (FIG. 8c). Monitoring transposition following expression of the native array configuration confirmed that functional guide RNAs were produced both from the spacer with the canonical repeat structure at the leader-proximal position and the terminal spacer flanked by highly diverged atypical repeats (FIG. 3b). Interestingly, guide RNA-mediated transposition occurred at a higher frequency with the ffs-specific spacer even though it contained mismatches and was flanked by atypical repeats (FIG. 3b).

[0198] To test the individual contributions of the spacer, protospacer, and repeat sequences, we designed CRISPR array constructs with leader-proximal (typical) or terminal (atypical) flanking repeats as a single guide RNA expression construct and tested various native and synthetic spacer sequences individually. Not only were the guide RNAs with the atypical repeats functional, but also consistently allowed a higher frequency of transposition when compared to the typical repeat when tested with three different spacers (FIG. 3c). Additionally the ffs-specific spacer showed a higher frequency of transposition than the spacer directed at the plasmid target even though the plasmid spacer had a perfect match to its target and the ffs spacer had 10 mismatches to its target (several that were not at the sixth positions that are predicted to be flipped out) (FIG. 3c). Altering the native ffs-specific spacer so that it was a perfect match to the ffs protospacer consistently allowed a modestly higher frequency of transposition (FIG. 3c-d).

[0199] Guide RNA complexes were also designed using spacers matching different positions in lacZ (FIGS. 3d-e). We found that transposition frequency varied as much as 10-fold with different spacers, even though the sequences recognized all had the same candidate PAM sequence, a result that was not explained by the DNA strand that was targeted in the highly expressed lacZ gene (FIGS. 3d-e). However, regardless of the spacer tested, a modestly higher transposition frequency was consistently found with guide RNAs with the atypical repeats when compared with typical repeats in the Tn7-CRISPR-Cas system from A. salmonicida S44 (FIGS. 3c-d). These experiments confirmed that a functional guide RNA complex could be produced from atypical repeats and indicated that the functionality of these complexes show important differences from typical repeats. We found that multiple different positions could also be targeted in the E. coli chromosome using guide RNA-directed transposition supporting a view that this was not a plasmid-specific process (FIG. 8d-e).

### Example 3

[0200] Atypical Repeats Form Functionally Distinct Guide RNA Complexes with the Tn7-CRISPR-Cas System from A. salmonicida S44

[0201] Our experiments suggested that the guide RNA produced from atypical repeats was functional and appeared to allow enhanced transposition activity with the system derived from the Tn6900 element in A. salmonicida S44. To get a better understanding of the relevance of differences in the repeat sequences, we compared the sequences of the leader-proximal typical repeats with the atypical repeats flanking the terminal spacers to look for common trends across the two branches (FIG. 4a). In both branches there were common trends in the final repeat encoding the 3′ handle of the guide RNA with a tendency to lose the typical GTG (positions 1-3), a loss of conservation of the region cleaved from the final guide RNA (positions 21-28), and a general enrichment for adenines in the loop (FIG. 4a). Functional differences from changes with the typical and atypical repeats were examined with Tn6900 by making changes to the repeat regions encoding the 5′ and 3′ handles of guide RNAs (FIG. 4b). Changing the GUG region to an AUU in the 3′ handle of a typical repeat (typical*) or changing the AUU to a GUG in the atypical repeat (atypical*) resulted in only small changes to the frequency of guide RNA-directed transposition (FIG. 4b), suggesting these conserved positions are not alone responsible for the atypical repeat frequency advantage and that a more complicated interdependency is at play.

[0202] Previous work with a different I—F3 Tn7-CRISPR-Cas systems found with the Tn6677 element from Vibrio cholerae HE-45 indicated that guide RNA complexes could be directed to programed target sites in E. coli using guide RNAs (Klompe et al., 2019). The Tn6677 element is in the I-F3a branch of elements and provided a good point of comparison for understanding differences between the two branches of I—F3 Tn7-CRISPR-Cas elements (FIG. 1). Tn6677 naturally resides in the att site downstream of guaC and consistent with the trends we identified above, this element carries the att site targeting spacer in a noncontiguous array with an atypical repeat structure (FIG. 2). The Tns, Cas, and CRISPR array modules from Tn6677 were constructed under lactose and arabinose expression systems and tested in the transposition assay used for the Tn6900 derivative above (FIG. 9a). We found that transposition into the native guaC attachment site used by Tn6677 required the guaC-specific guide RNA encoded in the array and that the atypical repeats in Tn6677 were also functional (FIG. 4c). However, unlike the Tn6900 derivative, a similar frequency of transposition was found with the typical and atypical arrays (FIG. 4c) or with modest changes in the typical and atypical repeats with the Tn6677 element (FIG. 4d). Naturally occurring Tn7-like and Tn7-CRISPR-Cas elements control the left to right orientation with which they insert. Tn6677 may be relaxed for orientation control (FIG. 9b) (Klompe et al., 2019). The Tn6900 derivative showed bias for one orientation found with canonical Tn7 and found naturally when 24 independent insertions were analyzed (FIG. 9b). Tn6900 derivative insertions were ˜48 bp from the protospacer and occurred with target site duplication (FIG. 9c).

### Example 4

[0203] Guide RNAs can be Made Private to I—F3 Transposition by Mismatch Tolerance and a Specialized Function with Atypical Guide RNAs

[0204] A question not previously addressed with Tn7-CRISPR-Cas systems involves possible cross-talk between CRISPR arrays with other type I-F CRISPR-Cas systems. If the CRISPR array from a Tn7-CRISPR-Cas element with the guide RNAs specific to the chromosome could be used by a standard I-F1 system, the chromosome att site would be a target for degradation. This could limit the spread of I—F3 Tn7-CRISPR-Cas elements if it entered a new host that encoded a standard I-F1 CRISPR-Cas system. We investigated if the typical and atypical guide RNAs encoded in I—F3 CRISPR arrays could be accessed by a I-F1 system (Chowdhury et al., 2017). In a P. aerigunosa system we co-expressed the Cas proteins and a single spacer CRISPR array with a T7 expression system (Vorontsova et al., 2015). Repeats from the type I-F1 system from P. aerigunosa, the type I-F3a V. cholerae Tn6677 system or the type I-F3b system derived from A. salmonicida Tn6900 were examined using a transformation efficiency assay examining plasmids with and without a protospacer. In control experiments we observed robust interference using the I-F1 CRISPR-Cas system from P. aeruginosa PA14 (FIG. 5). Transformation was decreased over three orders of magnitude with the plasmid encoding a protospacer compared to a plasmid that lacked the protospacer. Similarly, the typical repeats of the I—F3 systems from Tn6677 and Tn6900 also allowed robust interference with the plasmid transformation assay when they contained an exact match to the protospacer in the plasmid. The repeats from the canonical I-F1 and I—F3 Tn7-CRISPR-Cas systems are similar (FIG. 10) and it is likely that the I—F3 Tn7-CRISPR-Cas systems rely on standard I-F1 systems for spacer acquisition.

[0205] We also tested the tolerance for mismatches in the I-F1 interference system, based on the observation that mismatches were common in the att site guide RNAs found in the Tn7-CRISPR-Cas systems. While the native mismatches had little or no effect on the ability to function for guide RNA-directed transposition with the Tn6900 derivative with 10 mismatches (FIG. 3c) and Tn6677 element with 7 mismatches (FIG. 4c), these same guide RNAs had a profound effect on interference with the I-F1 CRISPR-Cas system from P. aeruginosa PA14, allowing no observable interference in the transformation assay (FIG. 5). This indicates a form of privatization, where mismatches with the guide RNA have minimal or no impact on guide RNA-directed transposition, they are rendered unusable by the I-F1 system tested in our work.

[0206] We also determined if the specialized atypical guide RNAs can be used by a canonical I-F1 system. When a spacer was situated with atypical repeats from the I-F3b system found with the Tn6900 derivative, guide RNA complexes formed with atypical repeats were drastically reduced in their ability to function for interference in the plasmid transformation assay, even with a perfect spacer-protospacer match (FIG. 5). The compromised use with the atypical repeats for interference was in contrast to the enhanced use we found for guide RNA-directed transposition with the I-F3b system (FIGS. 3 and 4). This result indicates a second mechanism that would allow chromosomal-targeting spacers to be tolerated in hosts with standard I-F1 CRISPR-Cas systems by allowing them to remain private to the I-F3b system. This privatization was absent in the Tn6677 I-F3a system from V. cholerae. With the I-F3a Vc system, robust interference was found with either the typical repeats or the highly diverged atypical array from this element. However, the results below suggest that I-F3a Tn7-CRISPR-Cas elements can use a separate transcription network to help tolerate self-targeting spacers.

### Example 5

### I—F3 Elements Utilize Xre-Family Transcriptional Regulators to Regulate CRISPR-Cas Components

[0207] To better understand I—F3 Tn7-CRISPR-Cas element dissemination, we searched for genes conserved among diverse members of this group. One of the other genes found conserved across I—F3 Tn7-CRISPR-Cas elements were predicted Xre-family transcriptional regulators. The xre gene resides at a conserved position between the tnsABC and tniQ-cas8/5, 7,6 operons in nearly all I—F3 elements (FIG. 2a). While each of the two branches of I-F3 elements have xre genes, the predicted regulatory gene in each branch segregated with phylogenetically distinct families of controller (C) proteins associated with restriction-modification systems. I-F3a elements have a 68 amino acid Xre protein related to C.AhdI and I-F3b elements have a ˜100 amino acid Xre protein related to C.Csp231I (FIG. 11a). Candidate regulatory features could also be identified with the tniQ-cas and CRISPR arrays based on homology with the previously established systems (FIG. 11b, see below)(Streeter et al., 2004).

[0208] We analyzed putative promoter regions in I-F3a elements and discovered candidate sites for Xre-mediated regulation upstream of xre as well as directly upstream of the att-targeting spacer in Tn6677 and other members of this branch of elements (FIG. 6a). The regulatory regions were confirmed in vitro with two elements in the I-F3a branch, V. cholerae HE-45 Tn6677 (Vc) and V. parahaemolyticus RIMD221063 (Vp)(FIG. 6c). A functional role for this interaction was shown by a LacZ reporter assay. Xre was found to autoregulate its own pXre promoter, which allowed minimal transcription without Xre, was activated by low amounts of Xre, and repressed as the expression of Xre increased (FIG. 6e). Meanwhile the promoter identified for the att-targeting spacer (pAttGuide) was highly expressed when Xre was not present and increasingly repressed with increasing amounts of Xre induction (FIG. 6e). As shown below, this system provides a burst of the atypical guide RNA that is specific to the guaC or yciA att sites with I-F3a elements upon entry into a new host via zygotic induction.

[0209] I-F3b elements were also surveyed for inverted repeat motifs to investigate the functional role of the conserved C.Csp231I-like Xre regulator. Like I-F3a elements, conserved motifs were found in the promoter region of xre that were nearly identical to those used by C.Csp231I (FIG. 6b, FIG. 11b)(McGeehan et al., 2011). Unlike the I-F3a elements, the conserved motif could not be identified upstream of the CRISPR arrays with I-F3b elements, and instead we found a single copy of this motif upstream of the tniQ-cas8/5, 7,6 operon (FIGS. 2a and 6b). The regulatory regions were confirmed in vitro with two I-F3b elements from A. salmonicida S44 Tn6900 (As) and Vibrio sp. 10N.286.45.B6 (VB6). Binding to the two predicted motifs in the upstream region of Xre could be visualized as two separately migrating species (FIG. 6d). Mutating the xre-proximal regulatory motif weakened interaction as demonstrated by the higher concentration of protein required to achieve a full mobility shift (FIG. 6d). We additionally visualized interaction with the motif upstream of tniQ-cas8/5, 7, 6 and confirmed the sequence-specific nature of binding by utilizing a mutated motif which weakened interaction. LacZ reporter assays were again used to confirm a functional role in regulation. Xre regulator was shown to act as a repressor of its own pXre promoter (FIG. 6f). Interestingly, mutation of the proximal binding site which impaired binding in vitro resulted in Xre regulator instead acting as an activator, suggesting interaction with the distal site activates transcription while interaction with the proximal site represses it (FIG. 6f). Similar to the result with the I-F3a elements, the Xre regulator was able to repress tniQ-cas8/5, 7,6 expression and this repression was impaired by mutation of the conserved binding motif (FIG. 6f).

[0210] An additional assay was used to confirm zygotic induction following conjugal transfer of regulatory regions with examples from both the I-F3a and I-F3b systems. Consistent with the biochemistry and expression control data with the Xre proteins found in Tn7-CRISPR-Cas elements and previously literature with controller proteins, the Xre proteins allow tight repression in an established donor and a strong burst of expression when transmitted into a new recipient (FIG. 7). Recipient strains expressing Xre regulators are immunized from this expression burst following conjugation. To signify the Xre-dependent control demonstrated with CRISPR-Cas promoters in Tn7-CRISPR-Cas elements, the disclosure includes naming the xre genes rtaC and rtbC (RNA-guided transposon/transposition I-F3a or I-F3b controller).

### Discussion of Examples

[0211] It will be recognized from the foregoing that the present disclosure demonstrates, among other items, that the spacers used to target chromosomal sites show certain characteristics; in addition to residing in the last position in the array (FIG. 1), they are flanked by highly diverged repeats (FIG. 2) and maintain mismatches that show little or no impact on guide RNA-directed transposition (FIGS. 3c and 4c), but that render them unusable for interference with a conventional 1-F1 system (FIG. 5). The repeat divergence appears to be specifically beneficial for a type I-F3b element from A. salmonicida S44, as these atypical guide RNA complexes are almost completely unusable for I-F1-mediated interference even when perfectly matched to a target (FIG. 5), while allowing for a higher level of transposition than found with the typical guide RNAs (FIG. 3). The transposon-encoded guide RNAs that allow long-term memory to direct transposition into chromosomal sites are therefore privatized to the transposon-adapted I—F3 system using mismatch tolerance, specialized atypical guide RNAs, and selective regulation to guard against toxic self-targeting by canonical CRISPR-Cas defense systems. Guide RNAs that target protein coding genes show a concentration for mismatches at the 3^{rd} positions coincident with the wobble positions (FIG. 12). In the case of the I-F3b system from A. salmonicida S44, the atypical repeat appears to be a specific adaptation that allows a higher frequency of guide RNA targeted transposition (FIGS. 3 and 4) and privatization from a canonical I-F1 interference system (FIG. 5). The type I-F3a Tn7-CRISPR-Cas system from Tn6677 did not show enhanced transposition with the atypical array found in this system; the frequency of transposition was the same with the typical and the highly diverged atypical repeat (FIGS. 4c and 4d). The disclosure demonstrates that one subbranch within the I-F3b elements the final spacer is truncated by 10 to 12 base pairs in length (FIG. 1 and FIG. 13). These smaller spacers produce functional guide RNAs as predicted by the commensurate natural repositioning of the insertion closer to the protospacer (FIG. 13). As noted above, previous work in closely related CRISPR-Cas systems suggests that guide RNAs of this length will not be functional for targeting transposition nor robust interference (Klompe et al., 2019; Kuznedelov et al., 2016). However, the ability of the I-F3b systems to accommodate shorter guide RNAs could provide another mechanism of privatization from other I-F CRISPR-Cas systems. Naturally occurring minimal type I-F2 CRISPR-Cas systems tested in the laboratory are not functional for interference with similarly truncated guide RNAs, but can still form complexes capable of forming R-loops to matching protospacers (Gleditzsch et al., 2016).

[0212] The following Materials and Method were used to produce the results described in the foregoing Examples.

### Experimental Model and Subject Details

[0213] Escherichia co/i strains were grown at 30 or 37° C. in lysogeny broth (LB) or on LB agar (unless stated otherwise in the Method Details) supplemented with the following concentrations of antibiotics when appropriate: 100 μg/mL carbenicillin, 10 μg/mL gentamicin, 30 μg/mL chloramphenicol, 8 μg/mL tetracycline, 50 μg/mL kanamycin, 100 g/mL spectinomycin.

### Method Details

### Identifying Type I-F CRISPR-Guided Tn7-Like Transposons

[0214] In total, there were 53,079 genomes were analyzed. Profile HMMs associated with TnsA (PF08722,PF08721), TnsB (PF00665), TnsC (PF11426,PF05621), TniQ(PF06527), Cas5f(PF09614), Cas6f(PF09618), Cas7f(PF09615) and Xre family proteins(PF01381), which can be downloaded from The European Bioinformatics Institute (EMBL-EBI) Pfam database, were used for detecting homologs with hmmsearch (HMMER3).

[0215] Candidate proteins were grouped into tnsABC operons and tniQ-cas operon based on their orientation and proximity. Then each tnsABC operon was grouped with its downstream tniQ-cas operon into one transposon functional unit. The Xre/HTH (helix turn helix) proteins situated between the two operons and are homologous to restriction controller proteins (blastp, identity >40%) were defined as candidate regulators.

### CRISPR Array Detection

[0216] Manually curated CRISPR repeats of Tn7-CRISPR-Cas elements were used to create a DNA sequence profile, which was used as a query for nhmmscan searches (HMMER3) to find CRISPR repeats in the downstream 20-kb region of cas6. Putative repeats were grouped into arrays by their distances to each other. The distance between repeats was required to be >55 bp and <65 bp, the bit-score threshold is −1. The distance between last repeat and previous repeat was allowed to be between 43 bp and 55 bp, but in such cases its bit-score had to be >=0.3. The sum of bit-scores of repeats in an array cannot be lower than 6.0. The longest non-overlapping arrays are collected as putative CRISPR arrays. All repeats besides the final repeat from the first array downstream of cas6 were used to create an updated repeat profile, and the CRISPR detection procedure was repeated with the new profile twice.

### Protospacer Detection

[0217] To detect protospacers that match the transposon-associated CRISPR spacers, each spacer was converted into position-specific scoring matrix (PSSM) and used to search upstream 1-kb DNA of tnsA for matches with Biopython (threshold=11.0). Because every 6th base of spacers is flipped out in type I CRISPR Cascade complex, all 6th positions of the matrix are set to have equal weight on all four bases.

[0218] Except for ffs (SRP-RNA), the major attachment site genes that containing the candidate protospacers are classified with the annotations provided in NCBI. The attachment site SRP-RNA gene (ffs) is often poorly annotated, so it was reannotated using cmsearch (Infernal) and SRP-RNA profile (RF00169) available on RFAM (//rfam.xfam.org/).

### Constructing Similarity Trees

[0219] The TnsA, TniQ and Xre proteins were clustered using Cd-hit with identity threshold set to 90%. Multiple alignments of the representatives were done with MUSCLE. Similarity trees were made with FastTree using WAG evolutionary model and the discrete gamma model with 20 rate categories as previously described (Peters et al., 2017). The visualization of the trees, major attachment sites, CRISPR arrays and matched spacers was done with ETEToolkit.

### Identifying Shared Promoter Motifs of Xre and CRISPR-Cas Genes

[0220] The transposons were classified into two groups based on associated xre lengths (68 a.a. for I-F3a or ˜100 a.a. for I-F3b) and similarities to C.AhdI and C.Csp231I. For each group, the 100 bp upstream of xre, second CRISPR array, and tniQ-cas operon were collected and deduplicated with dedupe.sh (BBTools) with threshold of 70% identity or 30 edit distance. The sequences were then sent to MEME for motif detection and comparison.

### Comparing Consensus CRISPR Repeat Sequences of Chromosome Targeting Spacers to Those of Other Spacers

[0221] To make consensus sequences of CRISPR repeats, the transposon representatives with non-redundant TniQ were selected with Cd-hit and separated into two groups based on their attachment sites being ffs/rsmJ or guaC/yciA. The upstream and downstream CRISPR repeats of the chromosome targeting spacers, and repeats not flanking chromosome targeting spacers were collected and sequence logos created using WebLogo 3.

### Transposition Assays

[0222] All transposition assays were performed in MTP1191, or one of MTP997 or MTP1196 with an F plasmid derivative.

[0223] For Tn6900 transposition, strains used to monitor transposition were made competent by standard chemical methods (Peters, 2007) and transformed with pMTP130, pMTP140, and a derivative of pMTP150, pMTP160, pMTP170, or pMTP190 onto LB agar supplemented with 100 μg/mL carbenicillin, 10 μg/mL gentamicin, 30 μg/mL chloramphenicol, and 0.2% w/v glucose. After 16 hours incubation at 37° C., several hundred transformants were washed up in M9 minimal media (Peters, 2007) supplemented with 0.2% w/v maltose and diluted to a calculated OD=0.2 in M9 supplemented with 100 μg/mL carbenicillin, 10 μg/mL gentamicin, 30 μg/mL chloramphenicol, 0.2% w/v arabinose, and 100 μM IPTG to induce transposition.

[0224] For experiments monitoring transposition frequency through loss of sugar metabolism on MacConkey's media, induction pools were incubated for 24 hours with shaking at 30° C. before being serially diluted in LB and plated on MacConkeys 1% w/v lactose, sorbitol, or galactose. Plates were incubated at 37° C. for 16 hours before colonies were counted.

[0225] For experiments monitoring transposition frequency by the mate out assay (FIG. 9a), after 24 hours incubation with shaking at 30° C., a portion of induced cultures were washed once and resuspended in LB supplemented with 0.2% w/v glucose. After 2 hours incubation at 37° C. induced pools were mixed with prepared mid-log CW51 recipient strain at a ratio of 1:5 donor:recipient and incubated with gentle agitation for 90 minutes at 37° C. to allow mating. After incubation cultures were vortexed, placed on ice, then serially diluted in LB 0.2% w/v glucose and plated on LB supplemented with 20 μg/mL nalidixic acid, 100 μg/mL rifampicin, 100 μg/mL spectinomycin, 50 μg/mL X-gal, with or without 50 μg/mL kanamycin to sample the entire transconjugant population or select for transposition respectively. Plates were incubated at 37° C. for 36 hours before colonies were counted.

[0226] Tn6677 transposition assays were performed as above with function plasmids pMTP230, pMTP240, and a derivative of pMTP250, pMTP260, or pMTP270 with the exception of 8 μg/mL tetracycline replacing gentamicin when present.

[0227] In all experiments, non-target controls where the spacer did not match the target F plasmid were used, with transposition frequency similar to non-target rate in FIG. 3B for A. salmonicida S44 transposition, or FIG. 4D for Tn6677 transposition.

### Screen Orientation of Transposition Events

[0228] Individually isolated CW51 transconjugants with mini-element insertions from the mate out assay were purified on LB supplemented with 20 μg/mL nalidixic acid, 100 μg/mL rifampicin, 100 μg/mL spectinomycin, 50 μg/mL X-gal, and 50 μg/mL kanamycin. Colony PCR was performed using primer set A (JEP1386+JEP1958) or primer set B (JEP1387+JEP1958) to capture position and orientation of insertion events.

P. aeruginosa CRISPR Interference Assays

[0229] All interference assays were performed in BL21-AI. BL21-AI made competent by standard chemical methods (Peters, 2007) and transformed with pOPO322, pCsy_complex, and a derivative of pCOLADuet-1 onto LB agar supplemented with 100 μg/mL carbenicillin, 100 μg/mL spectinomycin, 30μg/mL chloramphenicol, and 0.2% w/v glucose. Overnight cultures grown in LB agar supplemented with 100 μg/mL carbenicillin, 100 μg/mL spectinomycin, 30 μg/mL chloramphenicol were diluted 1:50 in LB supplemented with 100 g/mL carbenicillin, 100 μg/mL spectinomycin, 30 μg/mL chloramphenicol, 100 μM IPTG and 1 mM arabinose. Cultures were grown to OD=0.4 before electrocompetent cells were prepared by standard methods (Peters, 2007) and transformed with 1 ng pOPO275 or pOPO390. Cells were recovered in SOC at 37° C. for one hour before being serially diluted and plated on LB supplemented with 100 μg/mL carbenicillin, 50 μg/mL kanamycin, 30 g/mL chloramphenicol, and 100 μg/mL spectinomycin. Plates were incubated at 37° C. for 16 hours before colonies were counted.

### Xre Protein Purification

[0230] pOPO223, pOPO239, pOPO331 or pOPO360 were transformed into BL21 (DE3), which was cultured in Terrific Broth at 37° C. and induced with 0.1 mM IPTG during log-phase. Cells were cultured an additional 12-16 hours at 18° C. before being collected with centrifugation and lysed by sonication in nickel buffer (20 mM HEPES-NaOH (pH 7.5), 500 mM NaCl, 30 mM imidazole, 5% (v/v) glycerol, 5 mM β-mercaptoethanol) supplemented with 0.15 mg/mL lysozyme. Lysate was cleared by centrifugation and loaded on Nickel-NTA column, washed with nickel buffer, and eluted over a 30 mM to 500 mM imidazole gradient in nickel buffer. Selected purified fractions were pooled, dialyzed and buffer exchanged into storage buffer (20 mM HEPES-NaOH (pH 7.5), 100 mM KCl, 5% (v/v) glycerol, 1 mM DTT). The purified proteins were snap-frozen with liquid nitrogen and stored at −80° C.

### Electrophoretic Mobility Shift Assay (EMSA)

[0231] The promoter fragments of putative Xre regulated genes and their mutated variants were PCR amplified and purified. 100 nM DNA was incubated with different amounts of purified Xre proteins in equilibrium buffer (50 mM Tris-HCl (pH 8.0), 1 mM DTT, 10 mM MgCl2) at 25° C. for 20 minutes then mixed with glycerol (final concentration 6%). EMSAs were performed in 6% non-denaturing TBE PAGE (Polyacrylamide gel) with 0.5×TBE as running buffer, running at 80V for one hour at room temperature. The gels were EtBr stained and visualized with UV imager.

[0232] DNA substrates were produced as follows: ArapBAD was amplified from pBAD24 (JEP175+JEP1364), pXre(Vp) and pAttguide(Vp) were amplified from V. parahaemolyticus RIMD221063 (JEP1956+JEP1957, pXre(Vp); JEP1954+JEP1955, pAttguide(Vp)), pXre(Vc) and pAttguide(Vc) were amplified from gBlock11 (JEP29+JEP30, pXre(Vc); JEP1553+JEP82, pAttguide(Vc)), pXre(As) was amplified from pOPO08 (JEP1321+JEP81), pTniQ(As) was amplified from pOPO09 (JEP1322+JEP81), pXre*(As) was amplified from pOPO10 (JEP1321+JEP81), pTniQ*(As) was amplified from pOPO11 (JEP1322+JEP81), pXre(VB6) was amplified from pOPO06 (JEP1553+JEP81), and pTniQ(VB6) was amplified from pOPO07 (JEP1554+JEP81).

### In Vivo Promoter Assay

[0233] pOPO256, pOPO258, pOPO364, or pOPO345 and a derivative of pOPO221 were transformed into BW27783 made competent by standard chemical methods (Peters, 2007) on LB agar supplemented with 100 μg/mL carbenicillin and 30 μg/mL chloramphenicol. Overnight cultures grown in LB supplemented with 100 μg/mL carbenicillin and 30 μg/mL chloramphenicol were diluted 1:100 into LB supplemented with 100 μg/mL carbenicillin, 30 g/mL chloramphenicol and various concentrations of glucose or arabinose as indicated in FIG. 6 and cultured for an additional 20 hours at 30° C. The LacZ activities were measured with standard Miller unit assay (Malke, 1993).

### Zygotic Induction Assay

[0234] P0429 was made competent by standard chemical methods (Peters, 2007) and transformed with one of pOPO392, pOPO394, or pOPO435 on LB agar supplemented with 50 μg/mL kanamycin to produce donor strains. DH5α was made competent by standard chemical methods (Peters, 2007) and transformed with pETDuet-1, pOPO395, pOPO397 or pOPO438 on LB agar supplemented with 100 μg/mL carbenicillin to produce recipient strains. Overnight cultures of donors and recipients grown in LB supplemented with appropriate antibiotics were diluted 1:10 in the same media and grown for two hours, then washed with LB three times to remove antibiotics. Donors and recipient strains were mixed at a 1:2 ratio and spotted on LB agar for mating at 37° C. The LacZ activity of the mating cells at different time points were measured with standard Miller unit assay (Malke, 1993). The non-mating control was done by spotting donors and recipients separately on the same plate.

### Strain Construction

[0235] MTP997 and MTP1196 were constructed by transforming pMTP112 or pMTP113 into BW27783 made competent by standard chemical methods (Peters, 2007) on LB agar supplemented with 100 μg/mL carbenicillin grown at 30° C. Individual colonies were purified on LB agar supplemented with 50 μg/mL kanamycin grown at 42° C. to select for miniTn7 insertion into the chromosome while curing pMS26 derivatives. Individual colonies were purified at 30° C. on LB agar supplemented with carbenicillin or kanamycin to confirm loss of carbenicillin resistance.

[0236] MTP1191 was constructed by P1 transduction of MTP997 with bacteriophage grown on strain EMG2 to replace lacZ deletion with wild-type lac operon. Transductants were selected on M9 minimal media supplemented with 0.2% w/v lactose.

[0237] P0429 was constructed by using recombineering (Datsenko and Wanner, 2000) to replace wild-type lacZ with a lacZ::miniTn7(genR) allele PCR amplified from a miniTn7(genR) lacZ insertion library.

### Plasmid Construction

[0238] Standard molecular cloning techniques were used to make the vectors described below using vendor instructions.

[0239] pMTP112 was constructed by ligating gBlock1 into the NotI site of pMS26 following digestion with NotI. The clone used has A. salmonicida left end proximal to the Tn7 right end. pMTP113 was constructed by assembling two PCR products amplified from pSL0527 (pDonor) (JEP1858+JEP1859 and JEP1860+JEP1861), one PCR product amplified from gBlock1 (JEP1862+JEP1863) and pMS26 digested with NotI using NEBuilder Hifi (NEB). pMTP114 was constructed by assembling two PCR products amplified from F plasmid (JEP1398+1340 and JEP1341+1399, GenBank: AP001918.1), one PCR product amplified from pMTP150 (JEP1343+JEP1344), one PCR product amplified from pBAD322S (JEP1345+JEP1346, GenBank: DQ131584.1) and pTSC29 digested with EcoRV using NEBuilder Hifi. pMTP115 was constructed by inserting a PCR product amplified from EMG2 (JEP1663+JEP1664, GenBank: U00096.3) into pMTP114 following digestion with BsaI using golden gate cloning (Engler et al., 2008). pMTP116 was constructed by inserting annealed oligos (JEP1485+JEP1486) into pMTP114 following digestion with BsaI using golden gate cloning. pMTP117 was constructed by inserting annealed and extended oligos (JEP1481+JEP1482) into pMP114 following digestion with BsaI using golden gate cloning. pMTP118 was constructed by inserting annealed and extended oligos (JEP1878+JEP1879) into pMTP114 following digestion with BsaI using golden gate cloning. pMTP130 was constructed by assembling gBlock2, gBlock3 and a PCR product amplified from pTA106 (JEP1146+JEP1467) digested by DraII with 3,800 bp fragment gel purified using NEBuilder Hifi. pMTP140 was constructed by assembling gBlock4, gBlock5, gBlock6 and pBAD322G digested with NcoI and HindIII using NEBuilder Hifi. pMTP150 was constructed by assembling two PCR products amplified from pBAD33 (JEP1766+JEP1767 and JEP1768+JEP1769) with gBlock7 and gBlock8 using NEBuilder Hifi.pMTP151 was constructed by inserting annealed oligos (JEP1477+JEP1478) into pMTP150 following digestion with BsaI using golden gate cloning. pMTP160 was constructed by assembling two PCR products amplified from pBAD33 (JEP1766+JEP1767 and JEP1768+JEP1769) with gBlock7 and one PCR product amplified from gBlock8 (JEP1475+JEP1773) using NEBuilder Hifi. pMTP161-165 were constructed by ligating annealed oligos (JEP1477+JEP1478, pMTP161; JEP1776+JEP1777, pMTP162; JEP1778+JEP1779, pMTP163; JEP1669+JEP1670, pMTP164; JEP1671+JEP1672, pMTP165). pMTP170 was constructed by assembling two PCR products amplified from pBAD33 (JEP1766+JEP1767 and JEP1770+JEP1769) with one PCR product amplified from gBlock7 (JEP1774+JEP1474) and one PCR product amplified from gBlock8 (JEP1475+JEP1775) using NEBuilder Hifi. pMTP171-183 were constructed by inserting annealed oligos (JEP1784+JEP1785, pMTP171; JEP1780+1781, pMTP172; JEP1782+JEP1783, pMTP173; JEP1794+JEP1795, pMTP174; JEP1796+JEP1797, pMTP175; JEP1786+JEP1787, pMTP176; JEP1788+JEP1789, pMTP177; JEP1798+JEP1799, pMTP178; JEP1800+JEP1801, pMTP179; JEP1808+JEP1809, pMTP180; JEP1810+JEP1811, pMTP181; JEP1816+JEP1817, pMTP182; JEP1818+JEP1819, pMTP183) into pMTP170 following digestion with BsaI using golden gate cloning. pMTP190 was constructed by assembling two PCR product amplified from pBAD33 (JEP1766+JEP1767 and JEP1771+JEP1769) using NEBuilder Hifi.pMTP191 and pMTP192 were constructed by annealing four oligos (JEP1928, JEP1929, JEP1930, JEP1931: pMTP191; JEP1932, JEP1933, JEP1934, JEP1935: pMTP192) and ligating with pMTP190 digested with XmaI and BsaI.

[0240] pMTP230 was constructed by assembling one PCR product amplified from pBAD33 (JEP1864+JEP1865), one PCR product amplified from pMTP130 (JEP1866+JEP1867) and pSL0284 digested with NcoI and PflFI with 3,707 bp fragment gel purified using NEBuilder Hifi. pMTP240 was constructed by assembling a PCR product amplified from pBAD322 (JEP1868+JEP1869) with pSL0284 digested with NdeI and BglI with 5,152 bp fragment gel purified using NEBuilder Hifi. pMTP250 was constructed by assembling a PCR product amplified from pCDFDuet-1 (JEP1838+JEP1839), a PCR product amplified from pBAD322 (JEP1834+JEP1835) and a PCR product amplified from pBBR1MCS-3 (JEP1836+JEP1837) using NEBuilder Hifi. pMTP260 and pMTP270 were constructed by annealing four oligos (JEP1870, JEP1871, JEP1872, JEP1873: pMTP260; JEP1908, JEP1909, JEP1910, JEP1911: pMTP270) and ligating with pMTP250 digested with XmaI and BsaI. pMTP261-264 were constructed by inserting annealed oligos (JEP1914+JEP1915, pMTP161; JEP1912+JEP1913, pMTP162; JEP1880+JEP1881, pMTP163; JEP1882+JEP1883, pMTP164) into pMTP260 following digestion with BsaI using golden gate cloning. pMTP271-274 were constructed by inserting annealed oligos (JEP1914+JEP1919, pMTP271; JEP1912+JEP1917, pMTP272; JEP1880+JEP1916, pMTP273; JEP1882+JEP1917, pMTP27) into pMTP270 following digestion with BsaI using golden gate cloning. pMTP275 and pMTP276 were constructed by annealing four oligos (JEP1920, JEP1921, JEP1922, JEP1923: pMTP275; JEP1924, JEP1925, JEP1926, JEP1927: pMTP276) and ligating with pMTP250 digested with XmaI and BsaI.

[0241] All F derivatives were made by using recombineering (Datsenko and Wanner, 2000) to replace a large region of plasmid F from strain EMG2 (GenBank: AP001918.1) with PCR fragments amplified from pMTP114 derivatives (JEP1376+1386. pMTP115, FΔ(finO-fxsA)::lacZ specR; pMTP116, FΔ(finO-fxsA)::cysH^{As} specR; pMTP117, FΔ(finO-fxsA):ffs^{As} specR; pMTP118, FΔ(finO-fxsA)::guaC^{Vc} specR).

[0242] pOPO256 was constructed by ligating a PCR product amplified from gBlock9 (JEP1657+JEP1757) digested with NdeI and HindIII into pBAD33 digested with the same enzymes. The resulting construct was digested with NdeI and XbaI and ligated with phosphorylated annealed oligos (JEP1842+JEP1843). pOPO258 was constructed by assembling a PCR product amplified from gBlock10 (JEP1764+JEP1765) with pBAD33 digested with NdeI and HindIII using NEBuilder Hifi. The resulting construct was digested with NdeI and XbaI and ligated with phosphorylated annealed oligos (JEP1842+JEP1843). pOPO364 was constructed by ligating a PCR product amplified from gDNA of V. parahaemolyticus RIMD221063 (kindly provided by Tobias Doerr) (JEP1952+JEP1960) digested with NdeI and HindIII and phosphorylated annealed oligos (JEP1842+JEP1843) into pBAD33 digested with NdeI and HindIII. pOPO345 was constructed by ligating a PCR product amplified from gBlock11 (JEP1555+JEP1556) digested with SpeI and HindIII into pBAD33 digested with XbaI and HindIII. pOPO221 was constructed by ligating a PCR product amplified from pBAD24 (JEP1759+JEP1760) digested with BsaI and XhoI with a PCR product amplified from EMG2 (JEP1761+JEP1762) digested with the same enzymes. pOPO227-230, pOPO332, pOPO334, pOPO341, and pOPO337 were constructed by ligating fragments from gBlock10 or gBlock11 digested with XhoI and StuI (gBlock10. pOPO227-230; gBlock11: pOPO332, pOPO334, pOPO341, pOPO337) into pOPO221 digested with XhoI and SmaI. pOPO329 and pOPO330 were constructed by ligating PCR products amplified from gDNA of V. parahaemolyticus RIMD221063 (JEP1956+JEP1957, pOPO329; JEP1954+JEP1955, pOPO330) digested with XhoI and StuI into pOPO221 digested with XhoI and SmaI. pOPO223, pOPO239, pOPO331, pOPO360 were constructed by ligating PCR products amplified (from gBlock9, JEP1675+JEP1758, pMTP016; from gBlock10, JEP1556+JEP1764, pMTP017; from gDNA of V. parahaemolyticus RIMD221063, JEP1952+JEP1953, pMTP018; from gBlock11, JEP1950+1951, pMTP019) digested with NdeI and XhoI into pET22b(+) digested with the same enzymes. pOPO390 and pOPO275 was constructed by ligating annealed oligos (JEP2119, JEP2120, JEP1906+JEP1907 respectively) into a PCR product amplified from pCOLADuet-1 (JEP1902+JEP1903) digested with SapI. pOPO322 was constructed by assembling a PCR product amplified from pCas1_pCas2/3 (JEP1889+JEP1890) and pACYCDuet-1 digested with NcoI and AvrII using NEBuilder Hifi. pOPO392 was constructed by assembling PCR products amplified from gDNA of V. parahaemolyticus RIMD221063 (JEP2107+JEP2108) and pOPO330 (JEP2109+JEP2110) with pBBR1MCS-2 digested with NsiI and BamHI using NEBuilder Hifi. pOPO394 was constructed by assembling PCR products amplified from gBlock10 (JEP2111+JEP2112, JEP2113+JEP2114) and pOPO227 (JEP2115+JEP2116) with pBBR1MCS-2 digested with NsiI and BamHI using NEBuilder Hifi. pOPO435 was constructed by assembling PCR products amplified from gBlock11 (JEP2154+JEP2155, JEP2156+JEP2157) and pOPO337 (JEP2158+JEP2159) with pBBR1MCS-2 digested with NsiI and BamHI using NEBuilder Hifi. pOPO395 was constructed by assembling a PCR product amplified from gDNA of V. parahaemolyticus RIMD221063 (JEP2101+JEP2102) and pETDuet-1 digested with XbaI and AvrII using NEBuilder Hifi. pOPO397 was constructed by assembling PCR products amplified from gBlock10 (JEP2103+JEP2104, JEP2105+JEP2106) with pETDuet-1 digested with XbaI and AvrII using NEBuilder Hifi. pOPO438 was constructed by assembling PCR products amplified from gBlock11 (JEP2160+JEP2161, JEP2162+JEP2163) with pETDuet-1 digested with XbaI and AvrII using NEBuilder Hifi.

[0243] pOPO374 was constructed by ligating a PCR product amplified from pCDFDuet-1 (JEP1577+JEP1891) digested with BsaI and two pairs of phosphorylated annealed oligos (JEP1995+JEP1996, JEP1997+JEP1998). pOPO376 and pOPO378 were constructed with the same method, but with oligos (JEP2003+JEP2004, JEP2005+JEP2006) and (JEP2007+JEP2008, JEP2009+JEP2010).

[0244] pMTP281-286 were constructed by ligating a PCR product amplified from pCDFDuet-1 (JEP2032+JEP2033) digested with BsaI with four annealed oligos (JEP2063, JEP2064, JEP2065, JEP2066: pMTP281; JEP2078, JEP2079, JEP2080, JEP2081: pMTP282; JEP2035, JEP2036, JEP2037, JEP2038: pMTP283; JEP2049, JEP2050, JEP2051, JEP2052: pMTP284; JEP2067, JEP2068, JEP2069, JEP2066: pMTP285; JEP2082, JEP2083, JEP2084, JEP2081: pMTP286).

### Quantification and Statistical Analysis

[0245] Statistical details are listed in the Figure Legends. When stated, experiments were performed with three biological replicates (n=3).

[0246] Plasmids used in this disclosure are the following. Plasmid sequences are provided in the sequence listing.

Plasmid Table

| Plasmid | Description |
|---|---|
| pMS26 | Tn7 shuttle vector containing Tn7 end sequences flanking a cloning |
| | site and tnsABCD. |
| pMTP112 (pMS26 | pMS26 containing Tn6900 right (112 bp) and left (120 bp) end |
| miniTn6900(kanR)) | sequences flanking kanR cassette between Tn7 ends. |
| pMTP113 | pMS26 containing Tn6677 right (127 bp) and left (145 bp) end |
| | sequences flanking kanR cassette between Tn7 ends. |
| pKD46 | Temperature-sensitive plasmid containing RED recombination genes |
| | under arabinose inducible control. |
| pTSC29 | Temperature-sensitive plasmid with chloramphenicol resistance |
| | marker. |
| pBAD322S | Expression vector with pBR322 replicon, arabinose expression |
| | system and spectinomycin resistance marker (GenBank: DQ131584). |
| pMTP114 | pTSC29 containing two 1,000 bp fragments from F plasmid flanking |
| | a 747 bp BsaI-DHFR-BsaI cassette and 1,213 bp specR cassette. |
| pMTP115 | pMTP114 with 3,310 bp lacZ including promoter inserted over BsaI- |
| | DHFR-BsaI cassette. |
| pMTP116 | pMTP114 with 52 bp sequence upstream cysH from A. salmonicida |
| | S44 pS44-1 inserted over BsaI-DHFR-BsaI cassette. |
| pMTP117 | pMTP114 with 68 bp bp 3′ ffs sequence from A. salmonicida S44 |
| | inserted over BsaI-DHFR-BsaI cassette. |
| pMTP118 | pMTP114 with 70 bp 3′ guaC sequence from V. cholerae HE-45 |
| | inserted over BsaI-DHFR-BsaI cassette. |
| pTA106 | Expression vector with pSC101 replicon, lactose promoter, |
| | ampicillin resistance marker. |
| pMTP130 (pTA106 | pTA106 with codon-optimized tnsABC from Tn6900 (FIG. 3B, 3C, |
| TnsABC(Tn6900)) | 3D, 3E, 4B, FIG. 8, 8E). |
| pBAD322G | Expression vector with pBR322 replicon, arabinose expression |
| | system and gentamycin resistance marker (GenBank: DQ119284.1). |
| pMTP140 | pBAD322G with codon-optimized tniQ-cas8/5-cas7-cas6 operon |
| (pBAD322G TniQ- | from Tn6900 inserted (FIG. 3B, 3C, 3D, 3E, 4B, FIG. 8D, 8E). |
| Cascade(Tn6900)) | |
| pBAD33 | Expression vector with pACYC replicon, arabinose expression |
| | system and chloramphenicol resistance marker. |
| pMTP150 | pBAD33 with CRISPR array from Tn6900 with BsaI-DHFR-BsaI |
| | cassette replacing spacer one with additional BsaI downstream of |
| | MCS removed. |
| pMTP151 | ρMTP150 with first spacer from Tn6900 CRISPR array inserted, |
| | restoring wild-type CRISPR array (FIG. 3B). |
| pMTP160 | pBAD33 with CRISPR repeat one and CRISPR repeat two (typical |
| | configuration) from Tn6900 flanking BsaI-DHFR-BsaI cassette with |
| | additional BsaI downstream of MCS removed. |
| pMTP161 | pMTP160 with first spacer from Tn6900 CRISPR array targeting |
| | plasmid cysH (FIG. 3C). |
| pMTP162 | pMTP160 with second spacer from Tn6900 CRISPR array targeting |
| | chromosomal ffs (ffs^{WT}) (FIG. 3C, 3D). |
| pMTP163 | pMTP160 with second spacer from Tn6900 CRISPR array targeting |
| | chromosomal ffs, with mismatches to protospacer corrected (ffs^{Exact}) |
| | (FIG. 3C, 3D). |
| pMTP164 | pMTP160 with lacZ-targeting spacer #3 (with TACC PAM) (FIG. |
| | 3D). |
| pMTP165 | pMTP160 with lacZ-targeting spacer #4 (with TACC PAM) (FIG. |
| | 3D, 4B). |
| pMTP170 | pBAD33 with CRISPR repeat two and CRISPR repeat three |
| (pBAD33 | (atypical configuration) from Tn6900 flanking BsaI-DHFR-BsaI |
| CRISPR(Tn6900)- | cassette with additional BsaI downstream of MCS removed. |
| entry) | |
| pMTP171 | pMTP170 with first spacer from Tn6900 CRISPR array targeting |
| | plasmid cysH (FIG. 3C). |
| pMTP172 | pMTP170 with second spacer from Tn6900 CRISPR array targeting |
| | chromosomal ffs (ffs^{WT}) (FIG. 3C, 3D). |
| pMTP173 | pMTP170 with second spacer from Tn6900 CRISPR array targeting |
| | chromosomal ffs, with mismatches to protospacer corrected (ffs^{Exact}) |
| | (FIG. 3C, 3D). |
| pMTP174 | pMTP170 with lacZ-targeting spacer #1 (with TACC PAM) (FIG. |
| | 3E, FIG. 8D). |
| pMTP175 | pMTP170 with lacZ-targeting spacer #2 (with TACC PAM) (FIG. |
| | 3E, FIG. 8D). |
| pMTP176 | pMTP170 with lacZ-targeting spacer #3 (with TACC PAM) (FIG. |
| | 3D, 3E). |
| pMTP177 | pMTP170 with lacZ-targeting spacer #4 (with TACC PAM) (FIG. |
| | 3D, 3E, 4B, FIG. 8D). |
| pMTP178 | pMTP170 with lacZ-targeting spacer #5 (with TACC PAM) (FIG. |
| | 3E). |
| pMTP179 | pMTP170 with lacZ-targeting spacer #6 (with TACC PAM) (FIG. |
| | 3E). |
| pMTP180 | pMTP170 with galK top strand-targeting spacer (with TACC PAM) |
| | (FIG. 8E). |
| pMTP181 | pMTP170 with galK bottom strand-targeting spacer (with TACC |
| | PAM) (FIG. 8E). |
| pMTP182 | pMTP170 with srlD top strand-targeting spacer (with TTCC PAM) |
| | FIG. 8E). |
| pMTP183 | pMTP170 with srlD bottom strand-targeting spacer (with TACC |
| | PAM) (FIG. 8E). |
| pMTP190 | pBAD33 with additional BsaI site outside of MCS removed. |
| pMTP191 | pMTP190 with lacZ-targeting spacer #4 flanked by Tn6900 typical |
| | repeats with changes at 3 nucleotide positions to corresponding |
| | atypical base (typical*) (FIG. 4B). |
| pMTP192 | pMTP190 with lacZ-targeting spacer #4 flanked by Tn6900 atypical |
| | repeats with changes at 3 nucleotide positions to corresponding |
| | typical base (atypical*) (FIG. 4B). |
| pSL0527 (pDonor) | pUC19 with Tn6677 right end left ends flanking chloramphenicol |
| | resistance cassette. |
| pSL0283 | pCOLADuet-1 with Tn6677 tnsABC. |
| (pTnsABC) | |
| pSL0284 | pCDFDuet-1 with Tn6677 tniQ-cas8/5-cas7-cas6 and Tn6677 |
| (pQCascade_entry) | CRISPR repeat entry module. |
| pBAD322 | Expression vector with pBR322 replicon, arabinose expression |
| | system and ampicillin resistance marker (GenBank: DQ119282). |
| pMTP230 | pBAD33 with araC and lac promoter removed with lac promoter and |
| | Tn6677 tnsABC inserted (FIG. 4C, 4D). |
| pMTP240 | pBAD322 with Tn6677 tniQ-cas8/5-cas7-cas6 inserted (FIG. 4C, |
| | 4D). |
| pBBR1MCS-3 | Expression vector with pBBR replicon, lactose expression system |
| | and tetracycline resistance marker. |
| pCDFDuet-1 | Expression vector with pCDF replicon, tandem T7 promoters, and |
| | spectinomycin resistance marker. |
| pMTP250 | Expression vector with pCDF replicon, arabinose expression system |
| | and tetracycline resistance marker. |
| pMTP260 | pMTP250 with two copies of Tn6677 repeat one (typical |
| | configuration) flanking BsaI sites. |
| pMTP261 | pMTP260 with fourth spacer from Tn6677 CRISPR array targeting |
| | chromosomal guaC (guaC^{WT}) (FIG. 4C). |
| pMTP262 | pMTP260 with fourth spacer from Tn6677 CRISPR array targeting |
| | chromosomal guaC, with mismatches to protospacer corrected |
| | (guaC^{Exact}) (FIG. 4C). |
| pMTP263 | pMTP260 with lacZ-targeting spacer #3 (with TACC PAM) (FIG. |
| | 4D). |
| pMTP264 | pMTP260 with lacZ-targeting spacer #4 (with TACC PAM) (FIG. |
| | 4D). |
| pMTP270 | pMTP250 with Tn6677 repeat five and repeat six (atypical |
| | configuration) flanking BsaI sites. |
| pMTP271 | pMTP270 with fourth spacer from Tn6677 CRISPR array targeting |
| | chromosomal guaC (guaC^{WT}) (FIG. 4C, 4D). |
| pMTP272 | pMTP270 with fourth spacer from Tn6677 CRISPR array targeting |
| | chromosomal guaC, with mismatches to protospacer corrected |
| | (guaC^{Exact}) (FIG. 4C). |
| pMTP273 | pMTP270 with lacZ-targeting spacer #3 (with TACC PAM) (FIG. |
| | 4D). |
| pMTP274 | pMTP270 with lacZ-targeting spacer #4 (with TACC PAM) (FIG. |
| | 4D). |
| pMTP275 | pMTP250 with lacZ-targeting spacer #4 flanked by Tn6677 typical |
| | repeats with changes at 3 nucleotide positions to corresponding |
| | atypical base (typical*) (FIG. 4D). |
| pMTP276 | pMTP250 with lacZ-targeting spacer #4 flanked by Tn6677 atypical |
| | repeats with changes at 3 nucleotide positions to corresponding |
| | typical base (atypical*) (FIG. 4D). |
| FΔ(finO- | F plasmid (GenBank: AP001918.1) with a 44,962 bp section from |
| fxsA)::lacZ specR | finO to fxsA replaced with 3,310 bp lacZ including promoter |
| | (GenBank: U00096.3) and 1,213 bp specR cassette (GenBank: |
| | DQ131584.1) (FIG. 3B, 3D, 3E, 4B, 4D). |
| FΔ(finO- | F plasmid (GenBank: AP001918.1) with a 44,962 bp section from |
| fxsA)::cysH^{As} specR | finO to fxsA replaced with 52 bp upstream cysH sequence from |
| | A. salmonicida S44 pS44-1 including protospacer (GenBank: |
| | CP022176.1) and 1,213 bp specR cassette (GenBank: DQ131584.1) |
| | (FIG. 3B, 3C). |
| FΔ(finO-fxsA)::ffs^{As} | F plasmid (GenBank: AP001918.1) with a 44,962 bp section from |
| specR | finO to fxsA replaced with 68 bp 3′ ffs sequence from A. salmonicida |
| | S44 including protospacer (GenBank: CP022181.1) and 1,213 bp |
| | specR cassette (GenBank: DQ131584.1) (FIG. 3B, 3C, 3D). |
| FΔ(finO- | F plasmid (GenBank: AP001918.1) with a 44,962 bp section from |
| fxsA)::guaC^{Vc} | finO to fxsA replaced with 70 bp 3′ guaC sequence from V. cholerae |
| specR | HE-45 including protospacer (GenBank: ALED01000027.1) and |
| | 1,213 bp specR cassette (GenBank: DQ131584.1) (FIG. 4C). |
| pCsy_complex | Carries csy1, csy2, csy3, and csy4 from Pseudomonas aeruginosa |
| | PA14 under T7 promoter (FIG. 5). |
| pCas1_Cas2/3 | Carries cas1, cas2/3 from Pseudomonas aeruginosa PA14. cas1 has |
| | Strep-Tag II. |
| pCOLADuet-1 | Expression vector with pCOLA replicon, tandem T7 promoters, and |
| | kanamycin resistance marker. |
| pACYCDuet-1 | Expression vector with pACYC replicon, tandem T7 promoters, and |
| | chloramphenicol resistance marker. |
| pOPO390 | pCOLADuet-1 with 3′ guaC from V. cholerae HE-45 protospacer |
| | sequence with CC PAM (FIG. 5). |
| pOPO275 | pCOLADuet-1 with 3′ ffs from A. salmonicida S44 protospacer |
| | sequence with CC PAM (FIG. 5). |
| pOPO322 | pACYCDuet-1 with cas1 and cas2/3 from P. aeruginosa PA14 |
| | (FIG. 5). |
| pOPO374 | pCDFDuet-1 with two copies of CRISPR repeat one from |
| | P. aeruginosa PA14 flanking a spacer matching chromosomal ffs |
| | perfectly (ffs^{Exact}) (FIG. 5). |
| pOPO376 | pCDFDuet-1 with CRISPR repeat one and CRISPR repeat two |
| | (typical configuration) from Tn6900 flanking second spacer from |
| | Tn6900 CRISPR array targeting chromosomal ffs, with mismatches |
| | to protospacer corrected (ffs^{Exact}) (FIG. 5). |
| pOPO378 | pCDFDuet-1 with CRISPR repeat two and CRISPR repeat three |
| | (atypical configuration) from Tn6900 flanking second spacer from |
| | Tn6900 CRISPR array targeting chromosomal ffs, with mismatches |
| | to protospacer corrected (ffs^{Exact}) (FIG. 5). |
| pMTP281 | pCDFDuet-1 with two copies of CRISPR repeat one (typical |
| | configuration) from Tn6677 flanking fourth spacer from Tn6677 |
| | CRISPR array targeting chromosomal guaC, with mismatches to |
| | protospacer corrected (guaC^{Exact}) (FIG. 5). |
| pMTP282 | pCDFDuet-1 with CRISPR repeat five and CRISPR repeat six |
| | (atypical configuration) from Tn6677 flanking fourth spacer from |
| | Tn6677 CRISPR array targeting chromosomal guaC, with |
| | mismatches to protospacer corrected (guaC^{Exact}) (FIG. 5). |
| pMTP283 | pCDFDuet-1 with CRISPR repeat one and CRISPR repeat two |
| | (typical configuration) from Tn6900 flanking second spacer from |
| | Tn6900 CRISPR array targeting chromosomal ffs (ffs^{WT}) (FIG. 5). |
| pMTP284 | pCDFDuet-1 with CRISPR repeat two and CRISPR repeat three |
| | (atypical configuration) from Tn6900 flanking second spacer from |
| | Tn6900 CRISPR array targeting chromosomal ffs (ffs^{WT}) (FIG. 5). |
| pMTP285 | pCDFDuet-1 with two copies of CRISPR repeat one (typical |
| | configuration) from Tn6677 flanking fourth spacer from Tn6677 |
| | CRISPR array targeting chromosomal guaC (guaC^{WT}) (FIG. 5). |
| pMTP286 | pCDFDuet-1 with CRISPR repeat five and CRISPR repeat six |
| | (atypical configuration) from Tn6677 flanking fourth spacer from |
| | Tn6677 CRISPR array targeting chromosomal guaC (guaC^{WT}) |
| | (FIG. 5). |
| pOPO256 | pBAD33 with modified weaker RBS (iGEM BBa_B0033) and xre |
| | gene from Tn6900 inserted (FIG. 6F). |
| pOPO258 | pBAD33 with modified weaker RBS (iGEM BBa_B0033) and xre |
| | gene from Vibrio sp. 10N.286.45.B6 inserted (FIG. 6F). |
| pOPO364 | pBAD33 with modified weaker RBS (iGEM BBa_B0033) and xre |
| | gene from V. parahaemolyticus RIMD221063 inserted (FIG. 6E). |
| pOPO345 | pBAD33 with modified weaker RBS (iGEM BBa_B0033) and xre |
| | gene from Tn6677 inserted (FIG. 6E). |
| pBAD24 | Expression vector with pBR322 replicon lacking rop gene copy |
| | control, arabinose expression system and ampicillin resistance |
| | marker (GenBank: DQ119282). |
| pOPO221 | pBAD24 with a promoterless, start codon-lacking lacZ inserted. |
| pOPO228 | pOPO221 with xre promoter from Vibrio sp. 10N.286.45.B6 fused to |
| | lacZ (FIG. 6F). |
| pOPO227 | pOPO221 with tniQ promoter from Vibrio sp. 10N.286.45.B6 fused |
| | to lacZ (FIG. 6F). |
| pOPO229 | pOPO221 with xre promoter from Tn6900 fused to lacZ (FIG. 6F). |
| pOPO230 | pOPO221 with tniQ promoter from Tn6900 fused to lacZ (FIG. |
| | 6F). |
| pOPO332 | pOPO221 with xre promoter from Tn6900 with proximal putative |
| | Xre binding site mutated fused to lacZ (FIG. 6F). |
| pOPO334 | pOPO221 with tniQ promoter from Tn6900 with putative Xre |
| | binding site mutated fused to lacZ (FIG. 6F). |
| pOPO329 | pOPO221 with xre promoter from V. parahaemolyticus |
| | RIMD221063 fused to lacZ (FIG. 6E). |
| pOPO330 | pOPO221 with atypical guide RNA promoter from |
| | V. parahaemolyticus RIMD221063 fused to lacZ (FIG. 6E). |
| pOPO341 | pOPO221 with xre promoter from Tn6677 fused to lacZ (FIG. 6E). |
| pOPO337 | pOPO221 with atypical guide RNA promoter from Tn6677 fused to |
| | lacZ (FIG. 6E). |
| pET22b(+) | Expression vector with pBR322 replicon, T7 expression system, and |
| | ampicillin resistance marker. |
| pOPO223 | pET22b(+) with C-terminal His6-tagged (SEQ ID NO: 5806) codon- |
| | optimized xre from Tn6900 (FIG. 6D). |
| pOPO239 | pET22b(+) with C-terminal His6-tagged (SEQ ID NO: 5806) xre |
| | from Vibrio sp. 10N.286.45.B6 (FIG. 6D). |
| pOPO331 | pET22b(+) with C-terminal His6-tagged (SEQ ID NO: 5806) xre |
| | from V. parahaemolyticus RIMD221063 (FIG. 6C). |
| pOPO360 | pET22b(+) with C-terminal His6-tagged (SEQ ID NO: 5806) xre |
| | from Tn6677 (FIG. 6C). |
| pETDuet-1 | Expression vector with ColE1 replicon, tandem T7 promoters, and |
| | ampicillin resistance marker. |
| pBBR1MCS-2 | Expression vector with pBBR replicon, lactose expression system |
| | and kanamycin resistance marker. |
| pOPO392 | pBBR1MCS-2 with xre from V. parahaemolyticus RIMD221063 and |
| | pAttGuide(VP) fused to lacZ (FIG. 7). |
| pOPO394 | pBBR1MCS-2 with xre from Vibrio sp. 10N.286.45.B6 and |
| | pTniQ(VB6) fused to lacZ (FIG. 7). |
| pOPO435 | pBBR1MCS-2 with xre from V. cholerae Tn6677 and |
| | pAttGuide(Vc) fused to lacZ (FIG. 7). |
| pOPO395 | pETDuet-1 with xre from V. parahaemolyticus RIMD221063 under |
| | native promoter control (FIG. 7). |
| pOPO397 | pETDuet-1 with xre from Vibrio sp. 10N.286.45.B6 under native |
| | promoter control (FIG. 7). |
| pOPO438 | pETDuet-1 with xre from V. cholerae HE-45 Tn6677 under native |
| | promoter control (FIG. 7). |

The following oligonucleotides were used in this disclosure.

Oligonucleotide Table.

| | |
|---|---|
| JEP2033 | TGGTCTCACCATAGGCTGCTGCCACC (SEQ |
| | ID NO: 5684) |
| JEP2035 | ccgggtgaactgccgtataggcagccaagaa |
| | aAGG (SEQ ID NO: 5685) |
| JEP2036 | ccaacttggatgatttcttccagtccttttc |
| | ttggctgcctatacggcagttcac (SEQ |
| | ID NO: 5686) |
| JEP2037 | actggaagaaatcatccaagttggggactgt |
| | gaactgccgtataggcagccaagatt (SEQ |
| | ID NO: 5687) |
| JEP2038 | atggaatcttggctgcctatacggcagttca |
| | cagtcc (SEQ ID NO: 5688) |
| JEP2049 | ccgggtgaactgccgtataggcagccaagat |
| | tagg (SEQ ID NO: 5689) |
| JEP2050 | ccaacttggatgatttcttccagtcctaatc |
| | ttggctgcctatacggcagttcac (SEQ |
| | ID NO: 5690) |
| JEP2051 | actggaagaaatcatccaagttggggactat |
| | tttctgccgtaaaggcagatattatt (SEQ |
| | ID NO: 5691) |
| JEP2052 | atggaataatatctgcctttacggcagaaaa |
| | tagtcc (SEQ ID NO: 5692) |
| JEP2063 | ccggGTGAACTGCCGAGTAGGTAGCTGATAA |
| | CAAG (SEQ ID NO: 5693) |
| JEP2064 | TTGAACTCGGATAAACGTTGTACGCTTGTTA |
| | TCAGCTACCTACTCGGCAGTTCAC (SEQ |
| | ID NO: 5694) |
| JEP2065 | CGTACAACGTTTATCCGAGTTCAAGAGCAGT |
| | GAACTGCCGAGTAGGTAGCTGATAAC (SEQ |
| | ID NO: 5695) |
| JEP2066 | atggGTTATCAGCTACCTACTCGGCAGTTCA |
| | CTGCTC (SEQ ID NO: 5696) |
| JEP2067 | ccggGTGAACTGCCGAGTAGGTAGCTGATAA |
| | CAAA (SEQ ID NO: 5697) |
| JEP2068 | TTGTACTCGAATGAAGGTGGTTCGTTTGTTA |
| | TCAGCTACCTACTCGGCAGTTCAC (SEQ |
| | ID NO: 5698) |
| JEP2069 | CGAACCACCTTCATTCGAGTACAAGAGCAGT |
| | GAACTGCCGAGTAGGTAGCTGATAAC (SEQ |
| | ID NO: 5699) |
| JEP2078 | ccggTCATTACTACTGCAAAGTAGCTGATAA |
| | CAAG (SEQ ID NO: 5700) |
| JEP2079 | TTGAACTCGGATAAACGTTGTACGCTTGTTA |
| | TCAGCTACTTTGCAGTAGTAATGA (SEQ |
| | ID NO: 5701) |
| JEP2080 | CGTACAACGTTTATCCGAGTTCAAGAGCACT |
| | TTACTGCTGAATAAGTAGATAACTAC (SEQ |
| | ID NO: 5702) |
| JEP2081 | atggGTAGTTATCTACTTATTCAGCAGTAAA |
| | GTGCTC (SEQ ID NO: 5703) |
| JEP2082 | ccggTCATTACTACTGCAAAGTAGCTGATAA |
| | CAAA (SEQ ID NO: 5704) |
| JEP2083 | TTGTACTCGAATGAAGGTGGTTCGTTTGTTA |
| | TCAGCTACTTTGCAGTAGTAATGA (SEQ |
| | ID NO: 5705) |
| JEP2084 | CGAACCACCTTCATTCGAGTACAAGAGCACT |
| | TTACTGCTGAATAAGTAGATAACTAC (SEQ |
| | ID NO: 5706) |
| JEP2101 | GAGCGGATAACAATTCCCCTTCAACTAGAGT |
| | AAATGAACTC (SEQ ID NO: 5707) |
| JEP2102 | TGCTCAGCGGTGGCAGCAGCTTAGCAACTCT |
| | CGACAGTAG (SEQ ID NO: 5708) |
| JEP2103 | GAGCGGATAACAATTCCCCTTTAACTTCTCA |
| | GCTTTTCCAAC (SEQ ID NO: 5709) |
| JEP2104 | CCCAGCGAGGCTCAAAGCTGCGCGTAAAAAA |
| | G (SEQ ID NO: 5710) |
| JEP2105 | CAGCTTTGAGCCTCGCTGGGATGGGGTT |
| | (SEQ ID NO: 5711) |
| JEP2106 | TGCTCAGCGGTGGCAGCAGCTGACTCTTACA |
| | GGCAATAAAAACTTAGGATTG (SEQ ID |
| | NO: 5712) |
| JEP2107 | CGGCCGCTCTAGAACTAGTGTTAGCAACTCT |
| | CGACAGTAG (SEQ ID NO: 5713) |
| JEP2108 | TCAAAAATAATCAACTAGAGTAAATGAACTC |
| | (SEQ ID NO: 5714) |
| JEP2109 | CTCTAGTTGATTATTTTTGACACCAGACC |
| | (SEQ ID NO: 5715) |
| JEP2110 | ATTACAACAGTTTTTATGCAAGTTTAAAAAA |
| | TCAATACTATTACCATC (SEQ ID NO: |
| | 5716) |
| JEP2111 | CGGCCGCTCTAGAACTAGTGTGACTCTTACA |
| | GGCAATAAAAACTTAGGATTG (SEQ ID |
| | NO: 5717) |
| JEP2112 | CAGCTTTGAGCCTCGCTGGGATGGGGTT |
| | (SEQ ID NO: 5711) |
| JEP2113 | CCCAGCGAGGCTCAAAGCTGCGCGTAAAAAA |
| | G (SEQ ID NO: 5710) |
| JEP2114 | TTAATAAACTAGAGTTTGTAGAAACGCAAAA |
| | AG (SEQ ID NO: 5718) |
| JEP2115 | TACAAACTCTAGTTTATTAAAGTTCACAATT |
| | TGG (SEQ ID NO: 5719) |
| JEP2116 | ATTACAACAGTTTTTATGCATTATTTTTGAC |
| | ACCAGACC (SEQ ID NO: 5720) |
| JEP2119 | CTGAACCAAGCGTACAACGTTTATCCGAGTT |
| | CAAGAGCA (SEQ ID NO: 5721) |
| JEP2120 | GGCTGCTCTTGAACTCGGATAAACGTTGTAC |
| | GCTTGGTT (SEQ ID NO: 5722) |
| JEP2154 | CGGCCGCTCTAGAACTAGTGTTAGATATCCA |
| | TTGGTCACATTC (SEQ ID NO: 5723) |
| JEP2155 | CTAAGTCTTTCATTTAAATCGAATCACAAAA |
| | TG (SEQ ID NO: 5724) |
| JEP2156 | GATTTAAATGAAAGACTTAGCGAAACGG |
| | (SEQ ID NO: 5725) |
| JEP2157 | CTTTACTGCTGAATAAGTAGATAACTACGGA |
| | AGAAGCTCTCTAAC (SEQ ID NO: |
| | 5726) |
| JEP2158 | GTTATCTACTTATTCAGCAGTAAAGTTATTT |
| | TTGACACCAGACC (SEQ ID NO: 5727) |
| JEP2159 | ATTACAACAGTTTTTATGCACACACATCAAC |
| | ACCGTTAC (SEQ ID NO: 5728) |
| JEP2160 | GAGCGGATAACAATTCCCCTTTACGGAAGAA |
| | GCTCTCTAAC (SEQ ID NO: 5729) |
| JEP2161 | GATTTAAATGAAAGACTTAGCGAAACGG |
| | (SEQ ID NO: 5725) |
| JEP2162 | CTAAGTCTTTCATTTAAATCGAATCACAAAA |
| | TG (SEQ ID NO: 5724) |
| JEP2163 | TGCTCAGCGGTGGCAGCAGCTTAGATATCCA |
| | TTGGTCACATTC (SEQ ID NO: 5730) |

[0247] Synthesized gene fragments (gBlocks) used in this disclosure are referred to by the following names. Sequences are provides in the sequence listing.

| Gene fragments | Description |
|---|---|
| gBlock1 | miniTn6900(kanR) |
| gBlock2 | tnsABC(Tn6900) fragment one |
| gBlock3 | tnsABC(Tn6900) fragment two |
| gBlock4 | tniQ(Tn6900) |
| gBlock5 | Cascade(Tn6900) fragment one |
| gBlock6 | Cascade(Tn6900) fragment two |
| gBlock7 | CRISPR array Tn6900 fragment one |
| gBlock8 | CRISPR array Tn6900 fragment two |
| gBlock9 | xre(As) |
| gBlock10 | xre(VB6), pXre(VB6), pTniQ(VB6), |
| | pXre(As), pTniQ(As) |
| gBlock11 | xre(Vc), pXre(Vc), pAttguide(Vc), |
| | pXre*(As), pTniQ*(As), |

[0248] The following list of cited references is not an indication that any of the references are material to patentability.
[0249] Bainton, R., Gamas, P., and Craig, N. L. (1991). Tn7 transposition in vitro proceeds through an excised transposon intermediate generated by staggered breaks in DNA. Cell 65, 805-816.
[0250] Bainton, R. J., Kubo, K. M., Feng, J.-N., and Craig, N. L. (1993). Tn7 transposition: target DNA recognition is mediated by multiple Tn7-encoded proteins in a purified in vitro system. Cell 72, 931-943.
[0251] Boehmer, T., Vogler, A. J., Thomas, A., Sauer, S., Hergenroether, M., Straubinger, R. K., Birdsell, D., Keim, P., Sahl, J. W., Williamson, C. H. D., et al. (2018). Phenotypic characterization and whole genome analysis of extended-spectrum beta-lactamase-producing bacteria isolated from dogs in Germany. PLoS One 13, e0206252.
[0252] Borges, A. L., Davidson, A. R., and Bondy-Denomy, J. (2017). The Discovery, Mechanisms, and Evolutionary Impact of Anti-CRISPRs. Annu Rev Virol 4, 37-59.
[0253] Chowdhury, S., Carter, J., Rollins, M. F., Golden, S. M., Jackson, R. N., Hoffmann, C., Nosaka, L., Bondy-Denomy, J., Maxwell, K. L., Davidson, A. R., et al. (2017). Structure Reveals Mechanisms of Viral Suppressors that Intercept a CRISPR RNA-Guided Surveillance Complex. Cell 169, 47-57.e11.
[0254] Datsenko, K. A., and Wanner, B. L. (2000). One-step inactivation of chromosomal genes in Escherichia coli K-12 using PCR products. Proc Natl Acad Sci USA 97, 6640-6645.
[0255] Engler, C., Kandzia, R., and Marillonnet, S. (2008). A one pot, one step, precision cloning method with high throughput capability. PloS one 3, e3647-e3647.
[0256] Faure, G., Makarova, K. S., and Koonin, E. V. (2019a). CRISPR-Cas: Complex Functional Networks and Multiple Roles beyond Adaptive Immunity. J Mol Biol 431, 3-20.
[0257] Faure, G., Shmakov, S. A., Yan, W. X., Cheng, D. R., Scott, D. A., Peters, J. E., Makarova, K. S., and Koonin, E. V. (2019b). CRISPR-Cas in mobile genetic elements: counter-defence and beyond. Nat Rev Microbiol 17, 513-525.
[0258] Fineran, P. C., Gerritzen, M. J., Suarez-Diez, M., Kunne, T., Boekhorst, J., van Hijum, S. A., Staals, R. H., and Brouns, S. J. (2014). Degenerate target sites mediate rapid primed CRISPR adaptation. Proc Natl Acad Sci USA 111, E1629-1638.
[0259] Gleditzsch, D., Muller-Esparza, H., Pausch, P., Sharma, K., Dwarakanath, S., Urlaub, H., Bange, G., and Randau, L. (2016). Modulating the Cascade architecture of a minimal Type I-F CRISPR-Cas system. Nucleic Acids Res 44, 5872-5882.
[0260] Hoyland-Kroghsbo, N. M., Paczkowski, J., Mukherjee, S., Broniewski, J., Westra, E., Bondy-Denomy, J., and Bassler, B. L. (2017). Quorum sensing controls the Pseudomonas aeruginosa CRISPR-Cas adaptive immune system. Proc Natl Acad Sci USA 114, 131-135.
[0261] Jackson, R. N., Golden, S. M., van Erp, P. B., Carter, J., Westra, E. R., Brouns, S. J., van der Oost, J., Terwilliger, T. C., Read, R. J., and Wiedenheft, B. (2014). Structural biology. Crystal structure of the CRISPR RNA-guided surveillance complex from Escherichia coli. Science 345, 1473-1479.
[0262] Klompe, S. E., Vo, P. L. H., Halpin-Healy, T. S., and Sternberg, S. H. (2019). Transposon-encoded CRISPR-Cas systems direct RNA-guided DNA integration. Nature 571, 219-225.
[0263] Kuznedelov, K., Mekler, V., Lemak, S., Tokmina-Lukaszewska, M., Datsenko, K. A., Jain, I., Savitskaya, E., Mallon, J., Shmakov, S., Bothner, B., et al. (2016). Altered stoichiometry Escherichia coli Cascade complexes with shortened CRISPR RNA spacers are capable of interference and primed adaptation. Nucleic Acids Res 44, 10849-10861.
[0264] Makarova, K. S., Wolf, Y. I., Iranzo, J., Shmakov, S. A., Alkhnbashi, O. S., Brouns, S. J. J., Charpentier, E., Cheng, D., Haft, D. H., Horvath, P., et al. (2020). Evolutionary classification of CRISPR-Cas systems: a burst of class 2 and derived variants. Nat Rev Microbiol 18, 67-83.
[0265] Malke, H. (1993). Jeffrey H. Miller, A Short Course in Bacterial Genetics—A Laboratory Manual and Handbook for Escherichia coli and Related Bacteria. Cold Spring Harbor 1992. Cold Spring Harbor Laboratory Press. ISBN: 0-87969-349-5. Journal of Basic Microbiology 33, 278-278.
[0266] Martynov, A., Severinov, K., and Ispolatov, I. (2017). Optimal number of spacers in CRISPR arrays. PLoS Comput Biol 13, e1005891.
[0267] McGeehan, J. E., Streeter, S. D., Thresh, S. J., Taylor, J. E., Shevtsov, M. B., and Kneale, G. G. (2011). Structural analysis of a novel class of R-M controller proteins: C.Csp231I from Citrobacter sp. RFL231. J Mol Biol 409, 177-188.
[0268] Mitra, R., McKenzie, G. J., Yi, L., Lee, C. A., and Craig, N. L. (2010). Characterization of the TnsD-attTn7 complex that promotes site-specific insertion of Tn7. Mobile DNA 1, 18.
[0269] Mulepati, S., Heroux, A., and Bailey, S. (2014). Structural biology. Crystal structure of a CRISPR RNA-guided surveillance complex bound to a ssDNA target. Science 345, 1479-1484.
[0270] Parks, A. R., Li, Z., Shi, Q., Owens, R. M., Jin, M. M., and Peters, J. E. (2009). Transposition into replicating DNA occurs through interaction with the processivity factor. Cell 138, 685-695.
[0271] Patterson, A. G., Jackson, S. A., Taylor, C., Evans, G. B., Salmond, G. P. C., Przybilski, R., Staals, R. H. J., and Fineran, P. C. (2016). Quorum Sensing Controls Adaptive Immunity through the Regulation of Multiple CRISPR-Cas Systems. Mol Cell 64, 1102-1108.
[0272] Peters, J. E. (2014). Tn7. Microbiology Spectrum 2, 1-20.
[0273] Peters, J. E. (2019). Targeted transposition with Tn7 elements: safe sites, mobile plasmids, CRISPR/Cas and beyond. Mol Microbiol 112, 1635-1644.
[0274] Peters, J. E., and Craig, N. L. (2001). Tn7 recognizes target structures associated with DNA replication using the DNA binding protein TnsE. Genes & Dev 15, 737-747.
[0275] Peters, J. E., Makarova, K. S., Shmakov, S., and Koonin, E. V. (2017). Recruitment of CRISPR-Cas systems by Tn7-like transposons. Proceedings of the National Academy of Sciences 114, E7358.
[0276] Rice, P. A., Craig, N. L., and Dyda, F. (2020). Comment on “RNA-guided DNA insertion with CRISPR-associated transposases”. Science 368.
[0277] Rodic, A., Blagojevic, B., Zdobnov, E., Djordjevic, M., and Djordjevic, M. (2017). Understanding key features of bacterial restriction-modification systems through quantitative modeling. BMC Syst Biol 11, 377.
[0278] Shi, Q., Straus, M. R., Caron, J. J., Wang, H., Chung, Y. S., Guarne, A., and Peters, J. E. (2015). Conformational toggling controls target site choice for the heteromeric transposase element Tn7. Nucleic Acids Res.
[0279] Stellwagen, A. E., and Craig, N. L. (1998). Mobile DNA elements: controlling transposition with ATP-dependent molecular switches. Trends Biochem Sci 23, 486-490.
[0280] Strecker, J., Ladha, A., Gardner, Z., Schmid-Burgk, J. L., Makarova, K. S., Koonin, E. V., and Zhang, F. (2019). RNA-guided DNA insertion with CRISPR-associated transposases. Science 365, 48-53.
[0281] Strecker, J., Ladha, A., Makarova, K. S., Koonin, E. V., and Zhang, F. (2020). Response to Comment on “RNA-guided DNA insertion with CRISPR-associated transposases”. Science 368.
[0282] Streeter, S. D., Papapanagiotou, I., McGeehan, J. E., and Kneale, G. G. (2004). DNA footprinting and biophysical characterization of the controller protein C.AhdI suggests the basis of a genetic switch. Nucleic Acids Res 32, 6445-6453.
[0283] Vorontsova, D., Datsenko, K. A., Medvedeva, S., Bondy-Denomy, J., Savitskaya, E. E., Pougach, K., Logacheva, M., Wiedenheft, B., Davidson, A. R., Severinov, K., et al. (2015). Foreign DNA acquisition by the I-F CRISPR-Cas system requires all components of the interference machinery. Nucleic Acids Res 43, 10848-10860.
[0284] Waddell, C. S., and Craig, N. L. (1988). Tn7 transposition: two transposition pathways directed by five Tn7-encoded genes. Genes Dev 2, 137-149.
[0285] Westra, E. R., Pul, U., Heidrich, N., Jore, M. M., Lundgren, M., Stratmann, T., Wurm, R., Raine, A., Mescher, M., Van Heereveld, L., et al. (2010). H—NS-mediated repression of CRISPR-based immunity in Escherichia coli K12 can be relieved by the transcription activator LeuO. Mol Microbiol 77, 1380-1393.
[0286] Wiegand, T., Karambelkar, S., Bondy-Denomy, J., and Wiedenheft, B. (2020). Structures and Strategies of Anti-CRISPR-Mediated Immune Suppression. Annu Rev Microbiol.
[0287] Xiao, Y., Ng, S., Nam, K. H., and Ke, A. (2017). How type II CRISPR-Cas establish immunity through Cas1-Cas2-mediated spacer integration. Nature 550, 137-141.
[0288] Zhao, H., Sheng, G., Wang, J., Wang, M., Bunkoczi, G., Gong, W., Wei, Z., and Wang, Y. (2014). Crystal structure of the RNA-guided immune surveillance Cascade complex in Escherichia coli. Nature 515, 147-150.

[0289] While the disclosure has been described in conjunction with the detailed description thereof, the foregoing description is intended to illustrate and not limit the scope of the invention, which is defined by the scope of the appended claims. Other aspects, advantages, and modifications are within the scope of the following claims.

The application's sequence listing, which the Patent Office published only in electronic form, follows.

SEQUENCE LISTING (5806 sequences)

SEQ ID NO: 1 - DNA, 28 bp, Shewanella piezotolerans
  Shewanella piezotolerans WP3
gtgaactgccgaataggcagctgaaaag

SEQ ID NO: 2 - DNA, 28 bp, Shewanella piezotolerans
  Shewanella piezotolerans WP3
gtgaactgccgaacaggcagctgaaaat

SEQ ID NO: 3 - DNA, 28 bp, Shewanella piezotolerans
  Shewanella piezotolerans WP3
gatatctgccgaataggcagcaaaacct

SEQ ID NO: 4 - DNA, 32 bp, Shewanella piezotolerans
  Shewanella piezotolerans WP3
tagcactgcgcccgctggccaaacttctgccg

SEQ ID NO: 5 - DNA, 32 bp, Shewanella piezotolerans
  Shewanella piezotolerans WP3
ctatggccgaatatgaaaaatcgagttgtgga

SEQ ID NO: 6 - DNA, 32 bp, Shewanella piezotolerans
  Shewanella piezotolerans WP3
gtcagtgaagtacagtcaattaatcatgcttt

SEQ ID NO: 7 - DNA, 32 bp, Shewanella piezotolerans
  Shewanella piezotolerans WP3
gtgagcgaagtgcagccgataaagcacgcgtt

SEQ ID NO: 8 - DNA, 28 bp, Pseudoalteromonas spongiae
  Pseudoalteromonas spongiae UST010723-006
gtgacctgccgcataggcagctgtaaat

SEQ ID NO: 9 - DNA, 28 bp, Pseudoalteromonas spongiae
  Pseudoalteromonas spongiae UST010723-006
gtgacctgccgcataggtagctgaaatt

SEQ ID NO: 10 - DNA, 28 bp, Pseudoalteromonas spongiae
  Pseudoalteromonas spongiae UST010723-006
tattactgccgaaaaggtagaagccaat

SEQ ID NO: 11 - DNA, 32 bp, Pseudoalteromonas spongiae
  Pseudoalteromonas spongiae UST010723-006
accatcggaaaaagcgggtttgacagttgcac

SEQ ID NO: 12 - DNA, 32 bp, Pseudoalteromonas spongiae
  Pseudoalteromonas spongiae UST010723-006
caaaagtgaaggttatcgttaaacgagtttat

SEQ ID NO: 13 - DNA, 33 bp, Pseudoalteromonas spongiae
  Pseudoalteromonas spongiae UST010723-006
aggtcgggaagtgaacaatcacatcgtatgaca

SEQ ID NO: 14 - DNA, 33 bp, Pseudoalteromonas spongiae
  Pseudoalteromonas spongiae UST010723-006
aggcccggaagggagcagccacagcgtgtgact

SEQ ID NO: 15 - DNA, 28 bp, Pseudoalteromonas undina
  Pseudoalteromonas undina NCIMB 2128
gtgaactgccgagtaggcagctggaaat

SEQ ID NO: 16 - DNA, 28 bp, Pseudoalteromonas undina
  Pseudoalteromonas undina NCIMB 2128
gtgaactgccgagtaggcagctgaaatt

SEQ ID NO: 17 - DNA, 28 bp, Pseudoalteromonas undina
  Pseudoalteromonas undina NCIMB 2128
tttaactgccgaaaaggcagaggctaaa

SEQ ID NO: 18 - DNA, 32 bp, Pseudoalteromonas undina
  Pseudoalteromonas undina NCIMB 2128
aagctcgcaatatgcagtatgaagtgactcgc

SEQ ID NO: 19 - DNA, 33 bp, Pseudoalteromonas undina
  Pseudoalteromonas undina NCIMB 2128
aggccaggaagttaacaaccacatcttgtgact

SEQ ID NO: 20 - DNA, 33 bp, Pseudoalteromonas undina
  Pseudoalteromonas undina NCIMB 2128
aggcccggaagggagcagccacagtttgtgacg

SEQ ID NO: 21 - DNA, 28 bp, Grimontia indica
  Grimontia indica AK16
gtgtcctgccgcataggtagctgagaaa

SEQ ID NO: 22 - DNA, 28 bp, Grimontia indica
  Grimontia indica AK16
gtgtcctgccgcataggcagttgagata

SEQ ID NO: 23 - DNA, 28 bp, Grimontia indica
  Grimontia indica AK16
taaacctgccgcaaggcagagatgaaaa

SEQ ID NO: 24 - DNA, 32 bp, Grimontia indica
  Grimontia indica AK16
tcacaaagcggaattatatctcgctgtatgaa

SEQ ID NO: 25 - DNA, 33 bp, Grimontia indica
  Grimontia indica AK16
aggtctggaagttagcaacccacactaggaacc

SEQ ID NO: 26 - DNA, 33 bp, Grimontia indica
  Grimontia indica AK16
aggtccggaaggaagcagcccgcgcttgggacg

SEQ ID NO: 27 - DNA, 28 bp, Vibrio parahaemolyticus
  Vibrio parahaemolyticus CFSAN007435
gtgtcctgccgtgtaggcagctaagaaa

SEQ ID NO: 28 - DNA, 28 bp, Vibrio parahaemolyticus
  Vibrio parahaemolyticus CFSAN007435
gtgtcctgccgcataggcagccaataat

SEQ ID NO: 29 - DNA, 28 bp, Vibrio parahaemolyticus
  Vibrio parahaemolyticus CFSAN007435
gtgacctgccgtataggcagccaagaat

SEQ ID NO: 30 - DNA, 28 bp, Vibrio parahaemolyticus
  Vibrio parahaemolyticus CFSAN007435
cctacctgctgaacaagcagttaataat

SEQ ID NO: 31 - DNA, 32 bp, Vibrio parahaemolyticus
  Vibrio parahaemolyticus CFSAN007435
atatcagcaatagctagcatactaactgtgtc

SEQ ID NO: 32 - DNA, 32 bp, Vibrio parahaemolyticus
  Vibrio parahaemolyticus CFSAN007435
tacagccgacggaggttgtgatcaaaacagat

SEQ ID NO: 33 - DNA, 18 bp, Vibrio parahaemolyticus
  Vibrio parahaemolyticus CFSAN007435
aggtcaggaagaaagcaa

SEQ ID NO: 34 - DNA, 18 bp, Vibrio parahaemolyticus
  Vibrio parahaemolyticus CFSAN007435
aggtccggaaggaagcag

SEQ ID NO: 35 - DNA, 28 bp, Vibrio vulnificus
  Vibrio vulnificus VV4-03
gtgacctgccgcataggcagccaagaaa

SEQ ID NO: 36 - DNA, 28 bp, Vibrio vulnificus
  Vibrio vulnificus VV4-03
gtgacctgccgcataggcagccaagaat

SEQ ID NO: 37 - DNA, 28 bp, Vibrio vulnificus
  Vibrio vulnificus VV4-03
cctacctgctgaacaagcagttaataat

SEQ ID NO: 38 - DNA, 32 bp, Vibrio vulnificus
  Vibrio vulnificus VV4-03
aaacaatgcagtttatattccttatgatcaga

SEQ ID NO: 39 - DNA, 18 bp, Vibrio vulnificus
  Vibrio vulnificus VV4-03
aggttaggaagaaagcaa

SEQ ID NO: 40 - DNA, 18 bp, Vibrio vulnificus
  Vibrio vulnificus VV4-03
aggtccggaaggaagcag

SEQ ID NO: 41 - DNA, 28 bp, Vibrio parahaemolyticus
  Vibrio parahaemolyticus 856404
gtcacctgtcgcatagacagccaagaat

SEQ ID NO: 42 - DNA, 28 bp, Vibrio parahaemolyticus
  Vibrio parahaemolyticus 856404
gtgacctgccgcataggcagccaagaat

SEQ ID NO: 43 - DNA, 28 bp, Vibrio parahaemolyticus
  Vibrio parahaemolyticus 856404
cctacctgttgaacaagcagttaataat

SEQ ID NO: 44 - DNA, 31 bp, Vibrio parahaemolyticus
  Vibrio parahaemolyticus 856404
caaaaagggcaagttctcatctcttaaaaaa

SEQ ID NO: 45 - DNA, 18 bp, Vibrio parahaemolyticus
  Vibrio parahaemolyticus 856404
aggtcaggaagaaagcaa

SEQ ID NO: 46 - DNA, 18 bp, Vibrio parahaemolyticus
  Vibrio parahaemolyticus 856404
aggtccggaaggaagcag

SEQ ID NO: 47 - DNA, 28 bp, Vibrio crassostreae
  Vibrio crassostreae J5-20
gtgacctgccgcataggcagctaagaac

SEQ ID NO: 48 - DNA, 28 bp, Vibrio crassostreae
  Vibrio crassostreae J5-20
gtgtcctgccgcataggcagctaagaat

SEQ ID NO: 49 - DNA, 28 bp, Vibrio crassostreae
  Vibrio crassostreae J5-20
ccttcctgctgaacaagtagttaaaatc

SEQ ID NO: 50 - DNA, 31 bp, Vibrio crassostreae
  Vibrio crassostreae J5-20
atatgtttgcgctggttacgtagcaagagac

SEQ ID NO: 51 - DNA, 18 bp, Vibrio crassostreae
  Vibrio crassostreae J5-20
aggccaggaagaaagcaa

SEQ ID NO: 52 - DNA, 18 bp, Vibrio crassostreae
  Vibrio crassostreae J5-20
aggcctggaagggagcag

SEQ ID NO: 53 - DNA, 28 bp, Vibrio crassostreae
  Vibrio crassostreae LGP7
gtgacctgccgcataggcagctaagaac

SEQ ID NO: 54 - DNA, 28 bp, Vibrio crassostreae
  Vibrio crassostreae LGP7
gtgtcctgccgcataggcagctaagaat

SEQ ID NO: 55 - DNA, 28 bp, Vibrio crassostreae
  Vibrio crassostreae LGP7
ccttcctgctgaacaagtagttaaaatc

SEQ ID NO: 56 - DNA, 31 bp, Vibrio crassostreae; identical to SEQ ID NO: 50
  Vibrio crassostreae LGP7

SEQ ID NO: 57 - DNA, 18 bp, Vibrio crassostreae
  Vibrio crassostreae LGP7
aggccaggaagaaagcaa

SEQ ID NO: 58 - DNA, 18 bp, Vibrio crassostreae
  Vibrio crassostreae LGP7
aggcctggaagggagcag

SEQ ID NO: 59 - DNA, 28 bp, Vibrio splendidus
  Vibrio splendidus UCD-SED7
gtgtcctgccgcataggcagctaagaaa

SEQ ID NO: 60 - DNA, 28 bp, Vibrio splendidus
  Vibrio splendidus UCD-SED7
gtgtcctgccgcataggcagctaagaat

SEQ ID NO: 61 - DNA, 28 bp, Vibrio splendidus
  Vibrio splendidus UCD-SED7
cctgcctgctgaacaagcagttaagaat

SEQ ID NO: 62 - DNA, 32 bp, Vibrio splendidus
  Vibrio splendidus UCD-SED7
atagcaaactcatcaagcggcactttgatgct

SEQ ID NO: 63 - DNA, 18 bp, Vibrio splendidus
  Vibrio splendidus UCD-SED7
aggccaggaagaaagcaa

SEQ ID NO: 64 - DNA, 18 bp, Vibrio splendidus
  Vibrio splendidus UCD-SED7
aggcctggaagggagcag

SEQ ID NO: 65 - DNA, 28 bp, Vibrio splendidus
  Vibrio splendidus UCD-SED10
gtgtcctgccgcataggcagctaagaga

SEQ ID NO: 66 - DNA, 28 bp, Vibrio splendidus
  Vibrio splendidus UCD-SED10
gtgtcctgccgcataggcagctaagaat

SEQ ID NO: 67 - DNA, 28 bp, Vibrio splendidus
  Vibrio splendidus UCD-SED10
ccaacctgctgaacaagcagttaaaatc

SEQ ID NO: 68 - DNA, 32 bp, Vibrio splendidus
  Vibrio splendidus UCD-SED10
aacaatacatgcctagagttttcaaatggtat

SEQ ID NO: 69 - DNA, 18 bp, Vibrio splendidus
  Vibrio splendidus UCD-SED10
aggccaggaagaaagcaa

SEQ ID NO: 70 - DNA, 18 bp, Vibrio splendidus
  Vibrio splendidus UCD-SED10
aggcctggaagggagcag

SEQ ID NO: 71 - DNA, 28 bp, Pseudoalteromonas rubra
  Pseudoalteromonas rubra SCSIO 6842
atgctctgccgcataggcagctggaaat

SEQ ID NO: 72 - DNA, 28 bp, Pseudoalteromonas rubra
  Pseudoalteromonas rubra SCSIO 6842
atgctctgccgcataggcagctgaaatt

SEQ ID NO: 73 - DNA, 28 bp, Pseudoalteromonas rubra
  Pseudoalteromonas rubra SCSIO 6842
tataactgccgaaaaggcagagtccact

SEQ ID NO: 74 - DNA, 32 bp, Pseudoalteromonas rubra
  Pseudoalteromonas rubra SCSIO 6842
ggcggaagtatattttctaatgaacatcgtta

SEQ ID NO: 75 - DNA, 33 bp, Pseudoalteromonas rubra
  Pseudoalteromonas rubra SCSIO 6842
aggtcaggaagtaaacatccacatctaatgaca

SEQ ID NO: 76 - DNA, 33 bp, Pseudoalteromonas rubra
  Pseudoalteromonas rubra SCSIO 6842
aggtccggaaggaagcagccacagcggatgact

SEQ ID NO: 77 - DNA, 28 bp, Aliivibrio sp.
  Aliivibrio sp. 1S165
gtaacctgccggataggcagccaagaat

SEQ ID NO: 78 - DNA, 32 bp, Aliivibrio sp.
  Aliivibrio sp. 1S165
ataaccccaaatatcagaaccatcctttctac

SEQ ID NO: 79 - DNA, 28 bp, Vibrio parahaemolyticus
  Vibrio parahaemolyticus GCSL_R144
ggtatctgccgcataggcagtcaagaaa

SEQ ID NO: 80 - DNA, 28 bp, Vibrio parahaemolyticus
  Vibrio parahaemolyticus GCSL_R144
gtgatctgccgcataggcagctaagaat

SEQ ID NO: 81 - DNA, 28 bp, Vibrio parahaemolyticus
  Vibrio parahaemolyticus GCSL_R144
cctacctgctgaacaagcagtttttatt

SEQ ID NO: 82 - DNA, 32 bp, Vibrio parahaemolyticus
  Vibrio parahaemolyticus GCSL_R144
aggctaagtttcttatgttgctcaatttcttt

SEQ ID NO: 83 - DNA, 18 bp, Vibrio parahaemolyticus
  Vibrio parahaemolyticus GCSL_R144
aggtctggaagaaaacaa

SEQ ID NO: 84 - DNA, 18 bp, Vibrio parahaemolyticus
  Vibrio parahaemolyticus GCSL_R144
aggtccggaaggaagcag

SEQ ID NO: 85 - DNA, 28 bp, Vibrio cholerae
  Vibrio cholerae TP
gtgttctgccgaataggcagccaagaaa

SEQ ID NO: 86 - DNA, 28 bp, Vibrio cholerae
  Vibrio cholerae TP
gtgttctgccgaataggcagccaagaat

SEQ ID NO: 87 - DNA, 28 bp, Vibrio cholerae
  Vibrio cholerae TP
cctacctgctgaacaagcagttaataat

SEQ ID NO: 88 - DNA, 32 bp, Vibrio cholerae
  Vibrio cholerae TP
actgacgcgtggatggtcatcattgcctttat

SEQ ID NO: 89 - DNA, 32 bp, Vibrio cholerae
  Vibrio cholerae TP
ttgtcgccaacgtttgtatcaccgatgtatac

SEQ ID NO: 90 - DNA, 32 bp, Vibrio cholerae
  Vibrio cholerae TP
agtttgcattgtgactttggcttgcacgtacc

SEQ ID NO: 91 - DNA, 18 bp, Vibrio cholerae
  Vibrio cholerae TP
aggtcaggaagaaagcaa

SEQ ID NO: 92 - DNA, 18 bp, Vibrio cholerae
  Vibrio cholerae TP
agatccggaaggaagcag

SEQ ID NO: 93 - DNA, 28 bp, Vibrio parahaemolyticus
  Vibrio parahaemolyticus MAVP4
gtgtcctgccgtgtaggcagctaagaaa

SEQ ID NO: 94 - DNA, 28 bp, Vibrio parahaemolyticus
  Vibrio parahaemolyticus MAVP4
gtgtcctgccgcataggcagccaataat

SEQ ID NO: 95 - DNA, 28 bp, Vibrio parahaemolyticus
  Vibrio parahaemolyticus MAVP4
gtgacctgccgtataggcagccaagaat

SEQ ID NO: 96 - DNA, 28 bp, Vibrio parahaemolyticus
  Vibrio parahaemolyticus MAVP4
cctacctgctgaacaagcagttaataat

SEQ ID NO: 97 - DNA, 32 bp, Vibrio parahaemolyticus; identical to SEQ ID NO: 31
  Vibrio parahaemolyticus MAVP4

SEQ ID NO: 98 - DNA, 32 bp, Vibrio parahaemolyticus; identical to SEQ ID NO: 32
  Vibrio parahaemolyticus MAVP4

SEQ ID NO: 99 - DNA, 18 bp, Vibrio parahaemolyticus
  Vibrio parahaemolyticus MAVP4
aggtcaggaagaaagcaa

SEQ ID NO: 100 - DNA, 18 bp, Vibrio parahaemolyticus
  Vibrio parahaemolyticus MAVP4
aggtccggaaggaagcag

SEQ ID NO: 101 - DNA, 28 bp, Vibrio parahaemolyticus
  Vibrio parahaemolyticus MAVP78
gtgtcctgccgtgtaggcagctaagaaa

SEQ ID NO: 102 - DNA, 28 bp, Vibrio parahaemolyticus
  Vibrio parahaemolyticus MAVP78
gtgtcctgccgcataggcagccaataat

SEQ ID NO: 103 - DNA, 28 bp, Vibrio parahaemolyticus
  Vibrio parahaemolyticus MAVP78
gtgacctgccgtataggcagccaagaat

SEQ ID NO: 104 - DNA, 28 bp, Vibrio parahaemolyticus
  Vibrio parahaemolyticus MAVP78
cctacctgctgaacaagcagttaataat

SEQ ID NO: 105 - DNA, 32 bp, Vibrio parahaemolyticus; identical to SEQ ID NO: 31
  Vibrio parahaemolyticus MAVP78

SEQ ID NO: 106 - DNA, 32 bp, Vibrio parahaemolyticus; identical to SEQ ID NO: 32
  Vibrio parahaemolyticus MAVP78

SEQ ID NO: 107 - DNA, 18 bp, Vibrio parahaemolyticus
  Vibrio parahaemolyticus MAVP78
aggtcaggaagaaagcaa

SEQ ID NO: 108 - DNA, 18 bp, Vibrio parahaemolyticus
  Vibrio parahaemolyticus MAVP78
aggtccggaaggaagcag

SEQ ID NO: 109 - DNA, 28 bp, Vibrio parahaemolyticus
  Vibrio parahaemolyticus MAVP-112
gtgtcctgccgtgtaggcagctaagaaa

SEQ ID NO: 110 - DNA, 28 bp, Vibrio parahaemolyticus
  Vibrio parahaemolyticus MAVP-112
gtgtcctgccgcataggcagccaataat

SEQ ID NO: 111 - DNA, 28 bp, Vibrio parahaemolyticus
  Vibrio parahaemolyticus MAVP-112
gtgacctgccgtataggcagccaagaat

SEQ ID NO: 112 - DNA, 28 bp, Vibrio parahaemolyticus
  Vibrio parahaemolyticus MAVP-112
cctacctgctgaacaagcagttaataat

SEQ ID NO: 113 - DNA, 32 bp, Vibrio parahaemolyticus; identical to SEQ ID NO: 31
  Vibrio parahaemolyticus MAVP-112

SEQ ID NO: 114 - DNA, 32 bp, Vibrio parahaemolyticus; identical to SEQ ID NO: 32
  Vibrio parahaemolyticus MAVP-112

SEQ ID NO: 115 - DNA, 18 bp, Vibrio parahaemolyticus
  Vibrio parahaemolyticus MAVP-112
aggtcaggaagaaagcaa

SEQ ID NO: 116 - DNA, 18 bp, Vibrio parahaemolyticus
  Vibrio parahaemolyticus MAVP-112
aggtccggaaggaagcag

SEQ ID NO: 117 - DNA, 28 bp, Vibrio parahaemolyticus
  Vibrio parahaemolyticus CTVP34C
gtgtcctgccgtgtaggcagctaagaaa

SEQ ID NO: 118 - DNA, 28 bp, Vibrio parahaemolyticus
  Vibrio parahaemolyticus CTVP34C
gtgtcctgccgcataggcagccaataat

SEQ ID NO: 119 - DNA, 28 bp, Vibrio parahaemolyticus
  Vibrio parahaemolyticus CTVP34C
gtgacctgccgtataggcagccaagaat

SEQ ID NO: 120 - DNA, 28 bp, Vibrio parahaemolyticus
  Vibrio parahaemolyticus CTVP34C
cctacctgctgaacaagcagttaataat

SEQ ID NO: 121 - DNA, 32 bp, Vibrio parahaemolyticus; identical to SEQ ID NO: 31
  Vibrio parahaemolyticus CTVP34C

SEQ ID NO: 122 - DNA, 32 bp, Vibrio parahaemolyticus; identical to SEQ ID NO: 32
  Vibrio parahaemolyticus CTVP34C

SEQ ID NO: 123 - DNA, 18 bp, Vibrio parahaemolyticus
  Vibrio parahaemolyticus CTVP34C
aggtcaggaagaaagcaa

SEQ ID NO: 124 - DNA, 18 bp, Vibrio parahaemolyticus
  Vibrio parahaemolyticus CTVP34C
aggtccggaaggaagcag

SEQ ID NO: 125 - DNA, 28 bp, Vibrio coralliilyticus
  Vibrio coralliilyticus RE87
gtgtcctgtcgcatagacagctaagaaa

SEQ ID NO: 126 - DNA, 28 bp, Vibrio coralliilyticus
  Vibrio coralliilyticus RE87
gtgtcctgccgtataggcagctaagaat

SEQ ID NO: 127 - DNA, 28 bp, Vibrio coralliilyticus
  Vibrio coralliilyticus RE87
cccacctgctgaacaagtagtagatcat

SEQ ID NO: 128 - DNA, 31 bp, Vibrio coralliilyticus
  Vibrio coralliilyticus RE87
gtacacggtatcccagcaaccaaaacatctt

SEQ ID NO: 129 - DNA, 18 bp, Vibrio coralliilyticus
  Vibrio coralliilyticus RE87
aggtcaggaagaaagaaa

SEQ ID NO: 130 - DNA, 18 bp, Vibrio coralliilyticus
  Vibrio coralliilyticus RE87
aggtccggaaggaagcag

SEQ ID NO: 131 - DNA, 28 bp, Vibrio lentus
  Vibrio lentus 10N.286.46.A11
gtgtcctgccgcataggcagctaagaaa

SEQ ID NO: 132 - DNA, 28 bp, Vibrio lentus
  Vibrio lentus 10N.286.46.A11
gtgtcctgccgcataggcagttaagaat

SEQ ID NO: 133 - DNA, 28 bp, Vibrio lentus
  Vibrio lentus 10N.286.46.A11
ccaatctgctgaacaagcagttaagaat

SEQ ID NO: 134 - DNA, 32 bp, Vibrio lentus
  Vibrio lentus 10N.286.46.A11
atgagtcaatggtgcctggcgcggtacacgag

SEQ ID NO: 135 - DNA, 18 bp, Vibrio lentus
  Vibrio lentus 10N.286.46.A11
aggccaggaagaaagcaa

SEQ ID NO: 136 - DNA, 18 bp, Vibrio lentus
  Vibrio lentus 10N.286.46.A11
aggcctggaagggagcag

SEQ ID NO: 137 - DNA, 28 bp, Vibrio breoganii
  Vibrio breoganii 10N.222.49.A8
gtgtcctgccgcataggcagctaagaat

SEQ ID NO: 138 - DNA, 28 bp, Vibrio breoganii
  Vibrio breoganii 10N.222.49.A8
ccggcctgctgaacaagcagaatatgat

SEQ ID NO: 139 - DNA, 32 bp, Vibrio breoganii
  Vibrio breoganii 10N.222.49.A8
gacatcaaatcgccgggcatattttcagattc

SEQ ID NO: 140 - DNA, 18 bp, Vibrio breoganii
  Vibrio breoganii 10N.222.49.A8
agatcaggaagaaaacaa

SEQ ID NO: 141 - DNA, 18 bp, Vibrio breoganii
  Vibrio breoganii 10N.222.49.A8
aggtccggaaggaagcag

SEQ ID NO: 142 - DNA, 28 bp, Vibrio breoganii
  Vibrio breoganii 10N.222.51.A12
gtgaactgccgcataggcagctaagaaa

SEQ ID NO: 143 - DNA, 28 bp, Vibrio breoganii
  Vibrio breoganii 10N.222.51.A12
ccattctgctgaacaagcagtcgagtat

SEQ ID NO: 144 - DNA, 32 bp, Vibrio breoganii
  Vibrio breoganii 10N.222.51.A12
tgaagaagaaaggactcgatctagtgttgccg

SEQ ID NO: 145 - DNA, 18 bp, Vibrio breoganii
  Vibrio breoganii 10N.222.51.A12
aggtcaggaagaaagcaa

SEQ ID NO: 146 - DNA, 18 bp, Vibrio breoganii
  Vibrio breoganii 10N.222.51.A12
agatccggaaggaagcag

SEQ ID NO: 147 - DNA, 28 bp, Vibrio tasmaniensis
  Vibrio tasmaniensis 10N.261.51.E11
gtgtcctgccgcataggcagctaagaaa

SEQ ID NO: 148 - DNA, 28 bp, Vibrio tasmaniensis
  Vibrio tasmaniensis 10N.261.51.E11
gtgtcctgccgcataggcagctaagaat

SEQ ID NO: 149 - DNA, 28 bp, Vibrio tasmaniensis
  Vibrio tasmaniensis 10N.261.51.E11
ccttcctgctgaacaagcagttaataat

SEQ ID NO: 150 - DNA, 32 bp, Vibrio tasmaniensis
  Vibrio tasmaniensis 10N.261.51.E11
gctaaatagtcttgaaataccttgcttacctt

SEQ ID NO: 151 - DNA, 18 bp, Vibrio tasmaniensis
  Vibrio tasmaniensis 10N.261.51.E11
aggccaggaagaaagcaa

SEQ ID NO: 152 - DNA, 18 bp, Vibrio tasmaniensis
  Vibrio tasmaniensis 10N.261.51.E11
aggcctggaagggagcag

SEQ ID NO: 153 - DNA, 28 bp, Vibrio breoganii
  Vibrio breoganii 10N.261.51.E6
gtgaactgccgcataggcagctaagaaa

SEQ ID NO: 154 - DNA, 28 bp, Vibrio breoganii
  Vibrio breoganii 10N.261.51.E6
ccattctgctgaacaagcagtcgagtat

SEQ ID NO: 155 - DNA, 32 bp, Vibrio breoganii; identical to SEQ ID NO: 144
  Vibrio breoganii 10N.261.51.E6

SEQ ID NO: 156 - DNA, 18 bp, Vibrio breoganii
  Vibrio breoganii 10N.261.51.E6
aggtcaggaagaaagcaa

SEQ ID NO: 157 - DNA, 18 bp, Vibrio breoganii
  Vibrio breoganii 10N.261.51.E6
agatccggaaggaagcag

SEQ ID NO: 158 - DNA, 28 bp, Vibrio splendidus
  Vibrio splendidus ZS_138
gtgtcctgccgcataggcagctaagaaa

SEQ ID NO: 159 - DNA, 28 bp, Vibrio splendidus
  Vibrio splendidus ZS_138
gtgtcctgccgcataggcagctaagaat

SEQ ID NO: 160 - DNA, 28 bp, Vibrio splendidus
  Vibrio splendidus ZS_138
ccttcctgctgaacaagcagttaataat

SEQ ID NO: 161 - DNA, 32 bp, Vibrio splendidus
  Vibrio splendidus ZS_138
ttcggcaaaccgcgccaatagtttaacattga

SEQ ID NO: 162 - DNA, 18 bp, Vibrio splendidus
  Vibrio splendidus ZS_138
aggccaggaagaaagcaa

SEQ ID NO: 163 - DNA, 18 bp, Vibrio splendidus
  Vibrio splendidus ZS_138
aggcctggaagggagcag

SEQ ID NO: 164 - DNA, 28 bp, Vibrio splendidus
  Vibrio splendidus ZS_90
gtgtcctgccgcataggcagctaagaaa

SEQ ID NO: 165 - DNA, 28 bp, Vibrio splendidus
  Vibrio splendidus ZS_90
atgtcctgccgcataggcagctaagaat

SEQ ID NO: 166 - DNA, 28 bp, Vibrio splendidus
  Vibrio splendidus ZS_90
ccttcctgctgaacaagcagtagataat

SEQ ID NO: 167 - DNA, 34 bp, Vibrio splendidus
  Vibrio splendidus ZS_90
ttggcgaagaccgctccgagtcatctgaattaaa

SEQ ID NO: 168 - DNA, 18 bp, Vibrio splendidus
  Vibrio splendidus ZS_90
aggccaggaagaaagcaa

SEQ ID NO: 169 - DNA, 18 bp, Vibrio splendidus
  Vibrio splendidus ZS_90
aggcctggaagggagcag

SEQ ID NO: 170 - DNA, 28 bp, Vibrio crassostreae
  Vibrio crassostreae 28_O_19
gtgacctgccgcataggcagctaagaac

SEQ ID NO: 171 - DNA, 28 bp, Vibrio crassostreae
  Vibrio crassostreae 28_O_19
gtgtcctgccgcataggcagctaagaat

SEQ ID NO: 172 - DNA, 28 bp, Vibrio crassostreae
  Vibrio crassostreae 28_O_19
ccttcctgctgaacaagtagttaaaatc

SEQ ID NO: 173 - DNA, 31 bp, Vibrio crassostreae; identical to SEQ ID NO: 50
  Vibrio crassostreae 28_O_19

SEQ ID NO: 174 - DNA, 18 bp, Vibrio crassostreae
  Vibrio crassostreae 28_O_19
aggccaggaagaaagcaa

SEQ ID NO: 175 - DNA, 18 bp, Vibrio crassostreae
  Vibrio crassostreae 28_O_19
aggcctggaagggagcag

SEQ ID NO: 176 - DNA, 28 bp, Vibrio cholerae
  Vibrio cholerae 1
gtgttctgccgaataggcagccaagaat

SEQ ID NO: 177 - DNA, 28 bp, Vibrio cholerae
  Vibrio cholerae 1
cctacctgctgaacaagcagttaataat

SEQ ID NO: 178 - DNA, 18 bp, Vibrio cholerae
  Vibrio cholerae 1
aggtcaggaagaaagcaa

SEQ ID NO: 179 - DNA, 18 bp, Vibrio cholerae
  Vibrio cholerae 1
agatccggaaggaagcag

SEQ ID NO: 180 - DNA, 28 bp, Pseudoalteromonas ruthenica
  Pseudoalteromonas ruthenica S3245
gtgaactgccgagtaggcagctgaaaat

SEQ ID NO: 181 - DNA, 28 bp, Pseudoalteromonas ruthenica
  Pseudoalteromonas ruthenica S3245
gtgaactgccgagtaggcagctgaaatc

SEQ ID NO: 182 - DNA, 28 bp, Pseudoalteromonas ruthenica
  Pseudoalteromonas ruthenica S3245
tttaactgccgaaaaggcagggctaact

SEQ ID NO: 183 - DNA, 28 bp, Pseudoalteromonas ruthenica
  Pseudoalteromonas ruthenica S3245
gtgaactgccgagtaggcagctgaaatt

SEQ ID NO: 184 - DNA, 28 bp, Pseudoalteromonas ruthenica
  Pseudoalteromonas ruthenica S3245
tttaactgccgaaaaggcagggctagat

SEQ ID NO: 185 - DNA, 32 bp, Pseudoalteromonas ruthenica
  Pseudoalteromonas ruthenica S3245
tttgtgaaaggttaaccagagcgcgctttaga

SEQ ID NO: 186 - DNA, 33 bp, Pseudoalteromonas ruthenica
  Pseudoalteromonas ruthenica S3245
aggccaggaagtaatcaatcacaacatgttact

SEQ ID NO: 187 - DNA, 33 bp, Pseudoalteromonas ruthenica
  Pseudoalteromonas ruthenica S3245
aggccaggaagtaatcaatcacaacatgttatt

SEQ ID NO: 188 - DNA, 33 bp, Pseudoalteromonas ruthenica
  Pseudoalteromonas ruthenica S3245
aggcccggaagggagcagccacagcgtgtgacg

SEQ ID NO: 189 - DNA, 28 bp, Pseudoalteromonas ruthenica
  Pseudoalteromonas ruthenica S2898
gtgaactgccgagtaggcagctgaaaat

SEQ ID NO: 190 - DNA, 28 bp, Pseudoalteromonas ruthenica
  Pseudoalteromonas ruthenica S2898
gtgaactgccgagtaggcagctgaaatc

SEQ ID NO: 191 - DNA, 28 bp, Pseudoalteromonas ruthenica
  Pseudoalteromonas ruthenica S2898
tttaactgccgaaaaggcagggctaact

SEQ ID NO: 192 - DNA, 28 bp, Pseudoalteromonas ruthenica
  Pseudoalteromonas ruthenica S2898
gtgaactgccgagtaggcagctgaaatt

SEQ ID NO: 193 - DNA, 28 bp, Pseudoalteromonas ruthenica
  Pseudoalteromonas ruthenica S2898
tttaactgccgaaaaggcagggctagat

SEQ ID NO: 194 - DNA, 32 bp, Pseudoalteromonas ruthenica; identical to SEQ ID NO: 185
  Pseudoalteromonas ruthenica S2898

SEQ ID NO: 195 - DNA, 33 bp, Pseudoalteromonas ruthenica; identical to SEQ ID NO: 186
  Pseudoalteromonas ruthenica S2898

SEQ ID NO: 196 - DNA, 33 bp, Pseudoalteromonas ruthenica; identical to SEQ ID NO: 187
  Pseudoalteromonas ruthenica S2898

SEQ ID NO: 197 - DNA, 33 bp, Pseudoalteromonas ruthenica; identical to SEQ ID NO: 188
  Pseudoalteromonas ruthenica S2898

SEQ ID NO: 198 - DNA, 28 bp, Vibrio parahaemolyticus
  Vibrio parahaemolyticus F10_3
gtgtcctgccgtgtaggcagctaagaaa

SEQ ID NO: 199 - DNA, 28 bp, Vibrio parahaemolyticus
  Vibrio parahaemolyticus F10_3
gtgtcctgccgcataggcagccaagaat

SEQ ID NO: 200 - DNA, 28 bp, Vibrio parahaemolyticus
  Vibrio parahaemolyticus F10_3
cctacctgctgaacaagcagttaataat

SEQ ID NO: 201 - DNA, 32 bp, Vibrio parahaemolyticus; identical to SEQ ID NO: 31
  Vibrio parahaemolyticus F10_3

SEQ ID NO: 202 - DNA, 18 bp, Vibrio parahaemolyticus
  Vibrio parahaemolyticus F10_3
aggtcaggaagaaagcaa

SEQ ID NO: 203 - DNA, 18 bp, Vibrio parahaemolyticus
  Vibrio parahaemolyticus F10_3
aggtccggaaggaagcag

SEQ ID NO: 204 - DNA, 28 bp, Vibrio parahaemolyticus
  Vibrio parahaemolyticus B6_5
gtgtcctgccgtgtaggcagctaagaaa

SEQ ID NO: 205 - DNA, 28 bp, Vibrio parahaemolyticus
  Vibrio parahaemolyticus B6_5
gtgtcctgccgcataggcagccaataat

SEQ ID NO: 206 - DNA, 28 bp, Vibrio parahaemolyticus
  Vibrio parahaemolyticus B6_5
gtgacctgccgtataggcagccaagaat

SEQ ID NO: 207 - DNA, 28 bp, Vibrio parahaemolyticus
  Vibrio parahaemolyticus B6_5
cctacctgctgaacaagcagttaataat

SEQ ID NO: 208 - DNA, 32 bp, Vibrio parahaemolyticus; identical to SEQ ID NO: 31
  Vibrio parahaemolyticus B6_5

SEQ ID NO: 209 - DNA, 32 bp, Vibrio parahaemolyticus; identical to SEQ ID NO: 32
  Vibrio parahaemolyticus B6_5

SEQ ID NO: 210 - DNA, 18 bp, Vibrio parahaemolyticus
  Vibrio parahaemolyticus B6_5
aggtcaggaagaaagcaa

SEQ ID NO: 211 - DNA, 18 bp, Vibrio parahaemolyticus
  Vibrio parahaemolyticus B6_5
aggtccggaaggaagcag

SEQ ID NO: 212 - DNA, 28 bp, Vibrio cholerae
  Vibrio cholerae N2780
gtgttctgccgaataggcagccaagaaa

SEQ ID NO: 213 - DNA, 28 bp, Vibrio cholerae
  Vibrio cholerae N2780
gtgttctgccgaataggcagccaagaat

SEQ ID NO: 214 - DNA, 28 bp, Vibrio cholerae
  Vibrio cholerae N2780
cctacctgctgaacaagcagttaataat

SEQ ID NO: 215 - DNA, 32 bp, Vibrio cholerae
  Vibrio cholerae N2780
ttttgagatactagaggttgaaccaagcttgt

SEQ ID NO: 216 - DNA, 18 bp, Vibrio cholerae
  Vibrio cholerae N2780
aggtcaggaagaaagcaa

SEQ ID NO: 217 - DNA, 18 bp, Vibrio cholerae
  Vibrio cholerae N2780
agatccggaaggaagcag

SEQ ID NO: 218 - DNA, 28 bp, Vibrio mimicus
  Vibrio mimicus VM223
gtgttctgccgaataggcagccaagaat

SEQ ID NO: 219 - DNA, 28 bp, Vibrio mimicus
  Vibrio mimicus VM223
cctacctgctgaacaagcagttaataat

SEQ ID NO: 220 - DNA, 18 bp, Vibrio mimicus
  Vibrio mimicus VM223
aggtcaggaagaaagcaa

SEQ ID NO: 221 - DNA, 18 bp, Vibrio mimicus
  Vibrio mimicus VM223
agatccggaaggaagcag

SEQ ID NO: 222 - DNA, 28 bp, Vibrio crassostreae
  Vibrio crassostreae 9ZC13
gtgtcctgccgaataggcagctaagaaa

SEQ ID NO: 223 - DNA, 28 bp, Vibrio crassostreae
  Vibrio crassostreae 9ZC13
gtgtcctgccgaataggcagctaagaat

SEQ ID NO: 224 - DNA, 28 bp, Vibrio crassostreae
  Vibrio crassostreae 9ZC13
ccttcctgctgaacaagcagttaataat

SEQ ID NO: 225 - DNA, 32 bp, Vibrio crassostreae
  Vibrio crassostreae 9ZC13
tacaactcgaccaatttccttgccgtagtact

SEQ ID NO: 226 - DNA, 32 bp, Vibrio crassostreae
  Vibrio crassostreae 9ZC13
taccccaatccttattattgatctacaccgtc

SEQ ID NO: 227 - DNA, 18 bp, Vibrio crassostreae
  Vibrio crassostreae 9ZC13
aggccaggaagaaagcaa

SEQ ID NO: 228 - DNA, 28 bp, Vibrio sp.
  Vibrio sp. J2-12
gtgtcctgccgcataggcagctaagaaa

SEQ ID NO: 229 - DNA, 28 bp, Vibrio sp.
  Vibrio sp. J2-12
gtgtcctgccgcataggcagctaagaat

SEQ ID NO: 230 - DNA, 28 bp, Vibrio sp.
  Vibrio sp. J2-12
cctgcctgctgaacaagcagttaagaat

SEQ ID NO: 231 - DNA, 32 bp, Vibrio sp.; identical to SEQ ID NO: 62
  Vibrio sp. J2-12

SEQ ID NO: 232 - DNA, 18 bp, Vibrio sp.
  Vibrio sp. J2-12
aggccaggaagaaagcaa

SEQ ID NO: 233 - DNA, 18 bp, Vibrio sp.
  Vibrio sp. J2-12
aggcctggaagggagcag

SEQ ID NO: 234 - DNA, 28 bp, Vibrio sp.
  Vibrio sp. J2-15
gtgtcctgccgcataggcagctaagaat

SEQ ID NO: 235 - DNA, 28 bp, Vibrio sp.
  Vibrio sp. J2-15
ccaacctgctgaacaagcagttaagaat

SEQ ID NO: 236 - DNA, 32 bp, Vibrio sp.
  Vibrio sp. J2-15
atggactgctcgggtcccacaagtgaatatgc

SEQ ID NO: 237 - DNA, 18 bp, Vibrio sp.
  Vibrio sp. J2-15
aggccaggaagaaagcaa

SEQ ID NO: 238 - DNA, 18 bp, Vibrio sp.
  Vibrio sp. J2-15
aggcctggaagggagcag

SEQ ID NO: 239 - DNA, 28 bp, Vibrio cholerae
  Vibrio cholerae YB3G04
ttgccctgccgcataggcagccaagaaa

SEQ ID NO: 240 - DNA, 28 bp, Vibrio cholerae
  Vibrio cholerae YB3G04
gtgacctgccgtataggtagccaaaaat

SEQ ID NO: 241 - DNA, 28 bp, Vibrio cholerae
  Vibrio cholerae YB3G04
cctacctgctgaacaagcagttaataat

SEQ ID NO: 242 - DNA, 32 bp, Vibrio cholerae
  Vibrio cholerae YB3G04
tcagagcgtattagacggacgcgcatcagaca

SEQ ID NO: 243 - DNA, 18 bp, Vibrio cholerae
  Vibrio cholerae YB3G04
aggtcaggaagaaagcaa

SEQ ID NO: 244 - DNA, 18 bp, Vibrio cholerae
  Vibrio cholerae YB3G04
agatccggaaggaagcag

SEQ ID NO: 245 - DNA, 28 bp, Vibrio cholerae
  Vibrio cholerae YB2A06
ttgccctgccgcataggcagccaagaaa

SEQ ID NO: 246 - DNA, 28 bp, Vibrio cholerae
  Vibrio cholerae YB2A06
gtgacctgccgtataggtagccaaaaat

SEQ ID NO: 247 - DNA, 28 bp, Vibrio cholerae
  Vibrio cholerae YB2A06
cctacctgctgaacaagcagttaataat

SEQ ID NO: 248 - DNA, 32 bp, Vibrio cholerae; identical to SEQ ID NO: 242
  Vibrio cholerae YB2A06

SEQ ID NO: 249 - DNA, 18 bp, Vibrio cholerae
  Vibrio cholerae YB2A06
aggtcaggaagaaagcaa

SEQ ID NO: 250 - DNA, 18 bp, Vibrio cholerae
  Vibrio cholerae YB2A06
agatccggaaggaagcag

SEQ ID NO: 251 - DNA, 28 bp, Vibrio fluvialis
  Vibrio fluvialis FDAARGOS_104
gtgttccgccgagtaggcggctaagaat

SEQ ID NO: 252 - DNA, 28 bp, Vibrio fluvialis
  Vibrio fluvialis FDAARGOS_104
gtgttccgccgagtaggcggccaagaat

SEQ ID NO: 253 - DNA, 32 bp, Vibrio fluvialis
  Vibrio fluvialis FDAARGOS_104
ttggagcttttttgccgcaaaactggcagctt

SEQ ID NO: 254 - DNA, 32 bp, Vibrio fluvialis
  Vibrio fluvialis FDAARGOS_104
aaaagagatagtcagaaccagaatcactatca

SEQ ID NO: 255 - DNA, 28 bp, Vibrio natriegens
  Vibrio natriegens ATCC 14048
ggtatctgccgcataggcagtcaagaaa

SEQ ID NO: 256 - DNA, 28 bp, Vibrio natriegens
  Vibrio natriegens ATCC 14048
gtgatctgccgcataggcagctaagaat

SEQ ID NO: 257 - DNA, 28 bp, Vibrio natriegens
  Vibrio natriegens ATCC 14048
cctacctgctgaacaagcagtttttatt

SEQ ID NO: 258 - DNA, 32 bp, Vibrio natriegens; identical to SEQ ID NO: 82
  Vibrio natriegens ATCC 14048

SEQ ID NO: 259 - DNA, 18 bp, Vibrio natriegens
  Vibrio natriegens ATCC 14048
aggtctggaagaaaacaa

SEQ ID NO: 260 - DNA, 18 bp, Vibrio natriegens
  Vibrio natriegens ATCC 14048
aggtccggaaggaagcag

SEQ ID NO: 261 - DNA, 28 bp, Vibrio natriegens
  Vibrio natriegens CCUG 16373
gtgttccgccgagtaggcggctaaaaat

SEQ ID NO: 262 - DNA, 28 bp, Vibrio natriegens
  Vibrio natriegens CCUG 16373
gtgttccgccgagtaggcggttaagaat

SEQ ID NO: 263 - DNA, 32 bp, Vibrio natriegens
  Vibrio natriegens CCUG 16373
tttgtctgaggaatttcaagcggaatggaacc

SEQ ID NO: 264 - DNA, 28 bp, Vibrio parahaemolyticus
  Vibrio parahaemolyticus CDC_K5276
gtgtcctgccgtgtaggcagctaagaaa

SEQ ID NO: 265 - DNA, 28 bp, Vibrio parahaemolyticus
  Vibrio parahaemolyticus CDC_K5276
gtgtcctgccgcataggcagccaataat

SEQ ID NO: 266 - DNA, 28 bp, Vibrio parahaemolyticus
  Vibrio parahaemolyticus CDC_K5276
gtgacctgccgtataggcagccaagaat

SEQ ID NO: 267 - DNA, 28 bp, Vibrio parahaemolyticus
  Vibrio parahaemolyticus CDC_K5276
cctacctgctgaacaagcagttaataat

SEQ ID NO: 268 - DNA, 32 bp, Vibrio parahaemolyticus; identical to SEQ ID NO: 31
  Vibrio parahaemolyticus CDC_K5276

SEQ ID NO: 269 - DNA, 32 bp, Vibrio parahaemolyticus; identical to SEQ ID NO: 32
  Vibrio parahaemolyticus CDC_K5276

SEQ ID NO: 270 - DNA, 18 bp, Vibrio parahaemolyticus
  Vibrio parahaemolyticus CDC_K5276
aggtcaggaagaaagcaa

SEQ ID NO: 271 - DNA, 18 bp, Vibrio parahaemolyticus
  Vibrio parahaemolyticus CDC_K5276
aggtccggaaggaagcag

SEQ ID NO: 272 - DNA, 28 bp, Vibrio sp.
  Vibrio sp. 10N.261.45.E1
gtgacctgccgcataggcagctaagaaa

SEQ ID NO: 273 - DNA, 28 bp, Vibrio sp.
  Vibrio sp. 10N.261.45.E1
gtgtcctgccgcataggcagttaagaat

SEQ ID NO: 274 - DNA, 28 bp, Vibrio sp.
  Vibrio sp. 10N.261.45.E1
ccatcctgctgaacaagcagttaataat

SEQ ID NO: 275 - DNA, 32 bp, Vibrio sp.
  Vibrio sp. 10N.261.45.E1
ttgtcagatgcttgggctaagccaatcttttc

SEQ ID NO: 276 - DNA, 32 bp, Vibrio sp.
  Vibrio sp. 10N.261.45.E1
taattacacgccttgcgaagttctgtattgct

SEQ ID NO: 277 - DNA, 32 bp, Vibrio sp.
  Vibrio sp. 10N.261.45.E1
atagtcatagtgagcaaaaattcgatacatgt

SEQ ID NO: 278 - DNA, 18 bp, Vibrio sp.
  Vibrio sp. 10N.261.45.E1
aggccaggaagaaagcaa

SEQ ID NO: 279 - DNA, 32 bp, Vibrio sp.
  Vibrio sp. 10N.261.45.E1
ttgtcagatgcttggactaagccaatcttttc

SEQ ID NO: 280 - DNA, 28 bp, Pseudoalteromonas sp.
  Pseudoalteromonas sp. A601
gtgaactgccgagtaggcagctggaaat

SEQ ID NO: 281 - DNA, 28 bp, Pseudoalteromonas sp.
  Pseudoalteromonas sp. A601
gtgaactgccgagtaggcagctgaagtt

SEQ ID NO: 282 - DNA, 28 bp, Pseudoalteromonas sp.
  Pseudoalteromonas sp. A601
tttaactgccgaaaaggcagagggtaaa

SEQ ID NO: 283 - DNA, 32 bp, Pseudoalteromonas sp.
  Pseudoalteromonas sp. A601
ttttgaatgtggtctggtcgttcattacgatg

SEQ ID NO: 284 - DNA, 32 bp, Pseudoalteromonas sp.
  Pseudoalteromonas sp. A601
tctaagttaactaatgcttctttacgcaaatc

SEQ ID NO: 285 - DNA, 33 bp, Pseudoalteromonas sp.
  Pseudoalteromonas sp. A601
aggccgggaagtaaacaaccacaaattgtaact

SEQ ID NO: 286 - DNA, 33 bp, Pseudoalteromonas sp.; identical to SEQ ID NO: 20
  Pseudoalteromonas sp. A601

SEQ ID NO: 287 - DNA, 28 bp, Vibrio parahaemolyticus
  Vibrio parahaemolyticus MAVP56
gtgtcctgccgtgtaggcagctaagaaa

SEQ ID NO: 288 - DNA, 28 bp, Vibrio parahaemolyticus
  Vibrio parahaemolyticus MAVP56
gtgtcctgccgcataggcagccaataat

SEQ ID NO: 289 - DNA, 28 bp, Vibrio parahaemolyticus
  Vibrio parahaemolyticus MAVP56
gtgacctgccgtataggcagccaagaat

SEQ ID NO: 290 - DNA, 28 bp, Vibrio parahaemolyticus
  Vibrio parahaemolyticus MAVP56
cctacctgctgaacaagcagttaataat

SEQ ID NO: 291 - DNA, 32 bp, Vibrio parahaemolyticus; identical to SEQ ID NO: 31
  Vibrio parahaemolyticus MAVP56

SEQ ID NO: 292 - DNA, 32 bp, Vibrio parahaemolyticus; identical to SEQ ID NO: 32
  Vibrio parahaemolyticus MAVP56

SEQ ID NO: 293 - DNA, 18 bp, Vibrio parahaemolyticus
  Vibrio parahaemolyticus MAVP56
aggtcaggaagaaagcaa

SEQ ID NO: 294 - DNA, 18 bp, Vibrio parahaemolyticus
  Vibrio parahaemolyticus MAVP56
aggtccggaaggaagcag

SEQ ID NO: 295 - DNA, 28 bp, Vibrio parahaemolyticus
  Vibrio parahaemolyticus MAVP-90
gtgtcctgccgtgtaggcagctaagaaa

SEQ ID NO: 296 - DNA, 28 bp, Vibrio parahaemolyticus
  Vibrio parahaemolyticus MAVP-90
gtgtcctgccgcataggcagccaataat

SEQ ID NO: 297 - DNA, 28 bp, Vibrio parahaemolyticus
  Vibrio parahaemolyticus MAVP-90
gtgacctgccgtataggcagccaagaat

SEQ ID NO: 298 - DNA, 28 bp, Vibrio parahaemolyticus
  Vibrio parahaemolyticus MAVP-90
cctacctgctgaacaagcagttaataat

SEQ ID NO: 299 - DNA, 32 bp, Vibrio parahaemolyticus; identical to SEQ ID NO: 31
  Vibrio parahaemolyticus MAVP-90

SEQ ID NO: 300 - DNA, 32 bp, Vibrio parahaemolyticus; identical to SEQ ID NO: 32
  Vibrio parahaemolyticus MAVP-90

SEQ ID NO: 301 - DNA, 18 bp, Vibrio parahaemolyticus
  Vibrio parahaemolyticus MAVP-90
aggtcaggaagaaagcaa

SEQ ID NO: 302 - DNA, 18 bp, Vibrio parahaemolyticus
  Vibrio parahaemolyticus MAVP-90
aggtccggaaggaagcag

SEQ ID NO: 303 - DNA, 28 bp, Vibrio parahaemolyticus
  Vibrio parahaemolyticus MAVP-46
ggtatctgccgcataggcagtcaagaaa

SEQ ID NO: 304 - DNA, 28 bp, Vibrio parahaemolyticus
  Vibrio parahaemolyticus MAVP-46
gtgatctgccgcataggcagctaagaat

SEQ ID NO: 305 - DNA, 28 bp, Vibrio parahaemolyticus
  Vibrio parahaemolyticus MAVP-46
cctacctgctgaacaagcagtttttatt

SEQ ID NO: 306 - DNA, 32 bp, Vibrio parahaemolyticus; identical to SEQ ID NO: 82
  Vibrio parahaemolyticus MAVP-46

SEQ ID NO: 307 - DNA, 18 bp, Vibrio parahaemolyticus
  Vibrio parahaemolyticus MAVP-46
aggtctggaagaaaacaa

SEQ ID NO: 308 - DNA, 18 bp, Vibrio parahaemolyticus
  Vibrio parahaemolyticus MAVP-46
aggtccggaaggaagcag

SEQ ID NO: 309 - DNA, 28 bp, Pseudoalteromonas nigrifaciens
  Pseudoalteromonas nigrifaciens KMM 661
gtgacctgccgagtaggcagctgagaat

SEQ ID NO: 310 - DNA, 28 bp, Pseudoalteromonas nigrifaciens
  Pseudoalteromonas nigrifaciens KMM 661
gtgacctgccgtataggcagctgaagat

SEQ ID NO: 311 - DNA, 28 bp, Pseudoalteromonas nigrifaciens
  Pseudoalteromonas nigrifaciens KMM 661
taattctgccgaaaaggcagtgagtaaa

SEQ ID NO: 312 - DNA, 32 bp, Pseudoalteromonas nigrifaciens
  Pseudoalteromonas nigrifaciens KMM 661
gccttgctgcggtggtgcaggtgtgtttttat

SEQ ID NO: 313 - DNA, 32 bp, Pseudoalteromonas nigrifaciens
  Pseudoalteromonas nigrifaciens KMM 661
gatatgcacggcaataatacagcgtttgcaaa

SEQ ID NO: 314 - DNA, 32 bp, Pseudoalteromonas nigrifaciens
  Pseudoalteromonas nigrifaciens KMM 661
ggatttggattacatgcgccatcgaaataaag

SEQ ID NO: 315 - DNA, 31 bp, Pseudoalteromonas nigrifaciens
  Pseudoalteromonas nigrifaciens KMM 661
aaaaacaatcgattcgatgtttaagttaatg

SEQ ID NO: 316 - DNA, 31 bp, Pseudoalteromonas nigrifaciens
  Pseudoalteromonas nigrifaciens KMM 661
aaaaaaaaccgcttcgatgtatacgtaaaag

SEQ ID NO: 317 - DNA, 28 bp, Pseudoalteromonas arctica
  Pseudoalteromonas arctica MelAa3
gtgaactgccgagtaggcagctggaaat

SEQ ID NO: 318 - DNA, 28 bp, Pseudoalteromonas arctica
  Pseudoalteromonas arctica MelAa3
gtgaactgccgagtaggcagctgaagtt

SEQ ID NO: 319 - DNA, 28 bp, Pseudoalteromonas arctica
  Pseudoalteromonas arctica MelAa3
tttaactgccgaaaaggcagaggctaaa

SEQ ID NO: 320 - DNA, 32 bp, Pseudoalteromonas arctica
  Pseudoalteromonas arctica MelAa3
attcgtgaaaagcaaagacggtttacttagtc

SEQ ID NO: 321 - DNA, 33 bp, Pseudoalteromonas arctica
  Pseudoalteromonas arctica MelAa3
aggccgggaagtaaacaacctcaaattgtaact

SEQ ID NO: 322 - DNA, 33 bp, Pseudoalteromonas arctica; identical to SEQ ID NO: 20
  Pseudoalteromonas arctica MelAa3

SEQ ID NO: 323 - DNA, 28 bp, Pseudoalteromonas sp.
  Pseudoalteromonas sp. GutCa3
gtgacctgccgagtaggcagctgagaat

SEQ ID NO: 324 - DNA, 28 bp, Pseudoalteromonas sp.
  Pseudoalteromonas sp. GutCa3
gtgatctgccgtataggcagctgaagat

SEQ ID NO: 325 - DNA, 28 bp, Pseudoalteromonas sp.
  Pseudoalteromonas sp. GutCa3
taactctgccgaaaaggcagtgagtagt

SEQ ID NO: 326 - DNA, 32 bp, Pseudoalteromonas sp.; identical to SEQ ID NO: 314
  Pseudoalteromonas sp. GutCa3

SEQ ID NO: 327 - DNA, 31 bp, Pseudoalteromonas sp.; identical to SEQ ID NO: 315
  Pseudoalteromonas sp. GutCa3

SEQ ID NO: 328 - DNA, 31 bp, Pseudoalteromonas sp.
  Pseudoalteromonas sp. GutCa3
aaaaagaaccgttttgatgtctatgtaaagg

SEQ ID NO: 329 - DNA, 28 bp, Vibrio lentus
  Vibrio lentus 10N.286.46.A10
gtgttctgccgaataggcagctaagaaa

SEQ ID NO: 330 - DNA, 28 bp, Vibrio lentus
  Vibrio lentus 10N.286.46.A10
gtgtcctgccgaataggcagctaagaat

SEQ ID NO: 331 - DNA, 28 bp, Vibrio lentus
  Vibrio lentus 10N.286.46.A10
ccttcctgctgaacaagcagttaataat

SEQ ID NO: 332 - DNA, 33 bp, Vibrio lentus
  Vibrio lentus 10N.286.46.A10
aatccaaagatcagggggcggtcacagaatata

SEQ ID NO: 333 - DNA, 18 bp, Vibrio lentus
  Vibrio lentus 10N.286.46.A10
aggccaggaagaaagcaa

SEQ ID NO: 334 - DNA, 18 bp, Vibrio lentus
  Vibrio lentus 10N.286.46.A10
aggcctggaagggagcag

SEQ ID NO: 335 - DNA, 28 bp, Vibrio lentus
  Vibrio lentus 10N.261.45.E12
gtgtcctgccgcataggcagctaagaaa

SEQ ID NO: 336 - DNA, 28 bp, Vibrio lentus
  Vibrio lentus 10N.261.45.E12
gtgtcctgccgcataggcagctaagaat

SEQ ID NO: 337 - DNA, 28 bp, Vibrio lentus
  Vibrio lentus 10N.261.45.E12
ccttcctgctgaacaagcagttaataat

SEQ ID NO: 338 - DNA, 32 bp, Vibrio lentus
  Vibrio lentus 10N.261.45.E12
tttgagagaagatgcaaaatagaagcctttcg

SEQ ID NO: 339 - DNA, 18 bp, Vibrio lentus
  Vibrio lentus 10N.261.45.E12
aggccaggaagaaagcaa

SEQ ID NO: 340 - DNA, 18 bp, Vibrio lentus
  Vibrio lentus 10N.261.45.E12
aggcctggaagggagcag

SEQ ID NO: 341 - DNA, 28 bp, Vibrio lentus
  Vibrio lentus 10N.261.46.A1
gtgtcctgccgaataggcagctaagaaa

SEQ ID NO: 342 - DNA, 28 bp, Vibrio lentus
  Vibrio lentus 10N.261.46.A1
gtgtcctgccgaataggcagctaagaat

SEQ ID NO: 343 - DNA, 28 bp, Vibrio lentus
  Vibrio lentus 10N.261.46.A1
ccttcctgctgaacaagcagttaataat

SEQ ID NO: 344 - DNA, 32 bp, Vibrio lentus
  Vibrio lentus 10N.261.46.A1
catcaacaacaagaaatagaattaagctcgtg

SEQ ID NO: 345 - DNA, 18 bp, Vibrio lentus
  Vibrio lentus 10N.261.46.A1
aggccaggaagaaagcaa

SEQ ID NO: 346 - DNA, 18 bp, Vibrio lentus
  Vibrio lentus 10N.261.46.A1
aggcctggaagggagcag

SEQ ID NO: 347 - DNA, 28 bp, Vibrio lentus
  Vibrio lentus 10N.261.51.F9
gtgtcctgccgcataggcagctaagaaa

SEQ ID NO: 348 - DNA, 28 bp, Vibrio lentus
  Vibrio lentus 10N.261.51.F9
gtgtcctgccgcataggcagctaagaat

SEQ ID NO: 349 - DNA, 28 bp, Vibrio lentus
  Vibrio lentus 10N.261.51.F9
ccttcctgctgaacaagcagttaataat

SEQ ID NO: 350 - DNA, 32 bp, Vibrio lentus; identical to SEQ ID NO: 338
  Vibrio lentus 10N.261.51.F9

SEQ ID NO: 351 - DNA, 18 bp, Vibrio lentus
  Vibrio lentus 10N.261.51.F9
aggccaggaagaaagcaa

SEQ ID NO: 352 - DNA, 18 bp, Vibrio lentus
  Vibrio lentus 10N.261.51.F9
aggcctggaagggagcag

SEQ ID NO: 353 - DNA, 28 bp, Vibrio vulnificus
  Vibrio vulnificus 162
gtgacctgccgcataggcagccaagaaa

SEQ ID NO: 354 - DNA, 28 bp, Vibrio vulnificus
  Vibrio vulnificus 162
gtgacctgccgcataggcagccaagaat

SEQ ID NO: 355 - DNA, 28 bp, Vibrio vulnificus
  Vibrio vulnificus 162
cctacctgctgaacaagcagttaataat

SEQ ID NO: 356 - DNA, 32 bp, Vibrio vulnificus; identical to SEQ ID NO: 38
  Vibrio vulnificus 162

SEQ ID NO: 357 - DNA, 18 bp, Vibrio vulnificus
  Vibrio vulnificus 162
aggttaggaagaaagcaa

SEQ ID NO: 358 - DNA, 18 bp, Vibrio vulnificus
  Vibrio vulnificus 162
aggtccggaaggaagcag

SEQ ID NO: 359 - DNA, 28 bp, Vibrio vulnificus
  Vibrio vulnificus 32
gtgacctgccgcataggcagccaagaaa

SEQ ID NO: 360 - DNA, 28 bp, Vibrio vulnificus
  Vibrio vulnificus 32
gtgacctgccgcataggcagccaagaat

SEQ ID NO: 361 - DNA, 28 bp, Vibrio vulnificus
  Vibrio vulnificus 32
cctacctgctgaacaagcagttaataat

SEQ ID NO: 362 - DNA, 32 bp, Vibrio vulnificus; identical to SEQ ID NO: 38
  Vibrio vulnificus 32

SEQ ID NO: 363 - DNA, 18 bp, Vibrio vulnificus
  Vibrio vulnificus 32
aggttaggaagaaagcaa

SEQ ID NO: 364 - DNA, 18 bp, Vibrio vulnificus
  Vibrio vulnificus 32
aggtccggaaggaagcag

SEQ ID NO: 365 - DNA, 28 bp, Vibrio sp.
  Vibrio sp. E4404
gtgttccgccgaataggcggctaagaaa

SEQ ID NO: 366 - DNA, 28 bp, Vibrio sp.
  Vibrio sp. E4404
gtgttccgccgaataggcggctaagaat

SEQ ID NO: 367 - DNA, 32 bp, Vibrio sp.
  Vibrio sp. E4404
aaggatgggacatcttgggaggcaaacctgca

SEQ ID NO: 368 - DNA, 28 bp, Klebsiella oxytoca
  Klebsiella oxytoca 67
gtgaattgccgtacaggcagccaaagac

SEQ ID NO: 369 - DNA, 28 bp, Klebsiella oxytoca
  Klebsiella oxytoca 67
atgaactgccgtgcaggcagccaaaaat

SEQ ID NO: 370 - DNA, 28 bp, Klebsiella oxytoca
  Klebsiella oxytoca 67
atgaaatgccgaacaggcagacaaaaaa

SEQ ID NO: 371 - DNA, 31 bp, Klebsiella oxytoca
  Klebsiella oxytoca 67
accatacgttccatttttaccatttgagcta

SEQ ID NO: 372 - DNA, 32 bp, Klebsiella oxytoca
  Klebsiella oxytoca 67
gaaagtgttcgaaagtttgaaactcaacgggt

SEQ ID NO: 373 - DNA, 32 bp, Klebsiella oxytoca
  Klebsiella oxytoca 67
gaaagggttctagagttcgaatctctacgctt

SEQ ID NO: 374 - DNA, 28 bp, Aeromonas salmonicida
  Aeromonas salmonicida AJ83
gtgacctgccgcataggcagccaagaaa

SEQ ID NO: 375 - DNA, 28 bp, Aeromonas salmonicida
  Aeromonas salmonicida AJ83
gtgacctgccgcataggcagccaagatt

SEQ ID NO: 376 - DNA, 28 bp, Aeromonas salmonicida
  Aeromonas salmonicida AJ83
gttttctgccggaaaggcagtttttagt

SEQ ID NO: 377 - DNA, 32 bp, Aeromonas salmonicida
  Aeromonas salmonicida AJ83
aatatcgtccgaagcaaggccagagtgggttg

SEQ ID NO: 378 - DNA, 32 bp, Aeromonas salmonicida
  Aeromonas salmonicida AJ83
aggacaggaagaaaacacccaagttggggtct

SEQ ID NO: 379 - DNA, 32 bp, Aeromonas salmonicida
  Aeromonas salmonicida AJ83
aggaccggaaggtagcagccaaggcgggggac

SEQ ID NO: 380 - DNA, 28 bp, Vibrio penaeicida
  Vibrio penaeicida CAIM 285
gtgtcctgccgtataggcagctaggaaa

SEQ ID NO: 381 - DNA, 28 bp, Vibrio penaeicida
  Vibrio penaeicida CAIM 285
gtgtcctgccgtgtaggcagctaggaaa

SEQ ID NO: 382 - DNA, 28 bp, Vibrio penaeicida
  Vibrio penaeicida CAIM 285
gtgtcctgccgcataggcagttaagaaa

SEQ ID NO: 383 - DNA, 28 bp, Vibrio penaeicida
  Vibrio penaeicida CAIM 285
taatcctgccgaagaggcagttaactta

SEQ ID NO: 384 - DNA, 32 bp, Vibrio penaeicida
  Vibrio penaeicida CAIM 285
actattggtactcgaatggttaagcgttctcc

SEQ ID NO: 385 - DNA, 32 bp, Vibrio penaeicida
  Vibrio penaeicida CAIM 285
tctatccttgaggaacaaattttagatttaga

SEQ ID NO: 386 - DNA, 32 bp, Vibrio penaeicida
  Vibrio penaeicida CAIM 285
atgtttaagaattactcaggttaaacaccaga

SEQ ID NO: 387 - DNA, 28 bp, Vibrio crassostreae
  Vibrio crassostreae 16BF1_95
gtgacctgccgcataggcagctaagaac

SEQ ID NO: 388 - DNA, 28 bp, Vibrio crassostreae
  Vibrio crassostreae 16BF1_95
gtgtcctgccgcataggcagctaagaat

SEQ ID NO: 389 - DNA, 28 bp, Vibrio crassostreae
  Vibrio crassostreae 16BF1_95
ccttcctgctgaacaagtagttaaaatc

SEQ ID NO: 390 - DNA, 31 bp, Vibrio crassostreae; identical to SEQ ID NO: 50
  Vibrio crassostreae 16BF1_95

SEQ ID NO: 391 - DNA, 18 bp, Vibrio crassostreae
  Vibrio crassostreae 16BF1_95
aggccaggaagaaagcaa

SEQ ID NO: 392 - DNA, 18 bp, Vibrio crassostreae
  Vibrio crassostreae 16BF1_95
aggcctggaagggagcag

SEQ ID NO: 393 - DNA, 28 bp, Vibrio crassostreae
  Vibrio crassostreae 30_P_66
gtgacctgccgcataggcagctaagaat

SEQ ID NO: 394 - DNA, 28 bp, Vibrio crassostreae
  Vibrio crassostreae 30_P_66
ccttcctgctgaacaagcagttaaaatc

SEQ ID NO: 395 - DNA, 32 bp, Vibrio crassostreae
  Vibrio crassostreae 30_P_66
ttatgttcaaaccgacaaggtctatatggata

SEQ ID NO: 396 - DNA, 18 bp, Vibrio crassostreae
  Vibrio crassostreae 30_P_66
aggccaggaagaaagcaa

SEQ ID NO: 397 - DNA, 18 bp, Vibrio crassostreae
  Vibrio crassostreae 30_P_66
aggcctggaagggagcag

SEQ ID NO: 398 - DNA, 28 bp, Vibrio kanaloae
  Vibrio kanaloae 10N.261.48.E7
gtgtcctgccgaataggcagctaagaaa

SEQ ID NO: 399 - DNA, 28 bp, Vibrio kanaloae
  Vibrio kanaloae 10N.261.48.E7
gtgtcctgccgcataggcagttaggaat

SEQ ID NO: 400 - DNA, 28 bp, Vibrio kanaloae
  Vibrio kanaloae 10N.261.48.E7
ccattctgctgaacaagcagttaaagtc

SEQ ID NO: 401 - DNA, 32 bp, Vibrio kanaloae
  Vibrio kanaloae 10N.261.48.E7
cgcccccgattgtgcataaatatttagattgt

SEQ ID NO: 402 - DNA, 18 bp, Vibrio kanaloae
  Vibrio kanaloae 10N.261.48.E7
aggccaggaagaaagcaa

SEQ ID NO: 403 - DNA, 18 bp, Vibrio kanaloae
  Vibrio kanaloae 10N.261.48.E7
aggcctggaagggagcag

SEQ ID NO: 404 - DNA, 28 bp, Vibrio cholerae
  Vibrio cholerae A12JL4W4
gtgttctgccgaataggcagccaagaaa

SEQ ID NO: 405 - DNA, 28 bp, Vibrio cholerae
  Vibrio cholerae A12JL4W4
gtgttctgccgaataggcagccaagaat

SEQ ID NO: 406 - DNA, 28 bp, Vibrio cholerae
  Vibrio cholerae A12JL4W4
cctacctgctgaacaagcagttaataat

SEQ ID NO: 407 - DNA, 32 bp, Vibrio cholerae
  Vibrio cholerae A12JL4W4
gaaatgcgcaacttaactatcgctcagcctct

SEQ ID NO: 408 - DNA, 32 bp, Vibrio cholerae
  Vibrio cholerae A12JL4W4
tcgccactctattcctgctgcatcgactgcat

SEQ ID NO: 409 - DNA, 32 bp, Vibrio cholerae
  Vibrio cholerae A12JL4W4
agacgagaaagcctgtctatctgttcaatgat

SEQ ID NO: 410 - DNA, 18 bp, Vibrio cholerae
  Vibrio cholerae A12JL4W4
aggtcaggaagaaagcaa

SEQ ID NO: 411 - DNA, 18 bp, Vibrio cholerae
  Vibrio cholerae A12JL4W4
agatccggaaggaagcag

SEQ ID NO: 412 - DNA, 28 bp, Vibrio cholerae
  Vibrio cholerae A120618Z1
gtgttctgccgaataggcagccaagaaa

SEQ ID NO: 413 - DNA, 28 bp, Vibrio cholerae
  Vibrio cholerae A120618Z1
gtgttctgccgaataggcagccaagaat

SEQ ID NO: 414 - DNA, 28 bp, Vibrio cholerae
  Vibrio cholerae A120618Z1
cctacctgctgaacaagcagttaataat

SEQ ID NO: 415 - DNA, 32 bp, Vibrio cholerae; identical to SEQ ID NO: 409
  Vibrio cholerae A120618Z1

SEQ ID NO: 416 - DNA, 18 bp, Vibrio cholerae
  Vibrio cholerae A120618Z1
aggtcaggaagaaagcaa

SEQ ID NO: 417 - DNA, 18 bp, Vibrio cholerae
  Vibrio cholerae A120618Z1
agatccggaaggaagcag

SEQ ID NO: 418 - DNA, 28 bp, Marinomonas polaris
  Marinomonas polaris DSM 16579
gtgtcctgccgcataggcagctggtaaa

SEQ ID NO: 419 - DNA, 28 bp, Marinomonas polaris
  Marinomonas polaris DSM 16579
gtgtcctgccgcataggcagctgagatt

SEQ ID NO: 420 - DNA, 28 bp, Marinomonas polaris
  Marinomonas polaris DSM 16579
taaacctaccgaaaaggtagataaagcc

SEQ ID NO: 421 - DNA, 32 bp, Marinomonas polaris
  Marinomonas polaris DSM 16579
ataacgttagggcgtaaacattatcatcgact

SEQ ID NO: 422 - DNA, 32 bp, Marinomonas polaris
  Marinomonas polaris DSM 16579
cattttggcgcttttgaggtgtaaccaatttc

SEQ ID NO: 423 - DNA, 33 bp, Marinomonas polaris
  Marinomonas polaris DSM 16579
aggactggaagtaagattccgcaacgatgaaca

SEQ ID NO: 424 - DNA, 33 bp, Marinomonas polaris
  Marinomonas polaris DSM 16579
aggtccggaaggaagcagccacagcggtggact

SEQ ID NO: 425 - DNA, 28 bp, Pseudoalteromonas sp.
  Pseudoalteromonas sp. JB197
gtgaactgccgagtaggcagctggaaat

SEQ ID NO: 426 - DNA, 28 bp, Pseudoalteromonas sp.
  Pseudoalteromonas sp. JB197
gtgaactgccgagtaggcagctgaagtt

SEQ ID NO: 427 - DNA, 28 bp, Pseudoalteromonas sp.
  Pseudoalteromonas sp. JB197
ttttactgccgaaaaggcagaggttaaa

SEQ ID NO: 428 - DNA, 32 bp, Pseudoalteromonas sp.
  Pseudoalteromonas sp. JB197
tcatagcgacctgaacgccttatgttatacaa

SEQ ID NO: 429 - DNA, 32 bp, Pseudoalteromonas sp.
  Pseudoalteromonas sp. JB197
tgagtacgtaaaagagctgactgctcgactta

SEQ ID NO: 430 - DNA, 32 bp, Pseudoalteromonas sp.
  Pseudoalteromonas sp. JB197
ataaaaaacgatacatagcgctaatatatatt

SEQ ID NO: 431 - DNA, 33 bp, Pseudoalteromonas sp.
  Pseudoalteromonas sp. JB197
aggccgggaagtgaataaccacaaattgtgact

SEQ ID NO: 432 - DNA, 33 bp, Pseudoalteromonas sp.; identical to SEQ ID NO: 20
  Pseudoalteromonas sp. JB197

SEQ ID NO: 433 - DNA, 28 bp, Photobacterium damselae
  Photobacterium damselae NCTC11646
gtgtcctgccgcataggtagctaaaaat

SEQ ID NO: 434 - DNA, 28 bp, Photobacterium damselae
  Photobacterium damselae NCTC11646
gtgtcctgccgcataggcagctaagaat

SEQ ID NO: 435 - DNA, 28 bp, Photobacterium damselae
  Photobacterium damselae NCTC11646
cctacctgctgaacaagcagttaataat

SEQ ID NO: 436 - DNA, 32 bp, Photobacterium damselae
  Photobacterium damselae NCTC11646
ctttaaactcgaacgtttcggggttagtagca

SEQ ID NO: 437 - DNA, 32 bp, Photobacterium damselae
  Photobacterium damselae NCTC11646
ggctgttagatcgcagttagccacaatcgccc

SEQ ID NO: 438 - DNA, 18 bp, Photobacterium damselae
  Photobacterium damselae NCTC11646
aggtcaggaagaaagcaa

SEQ ID NO: 439 - DNA, 18 bp, Photobacterium damselae
  Photobacterium damselae NCTC11646
aggtccggaaggaagcag

SEQ ID NO: 440 - DNA, 28 bp, Pseudoalteromonas nigrifaciens
  Pseudoalteromonas nigrifaciens NCTC10691
gtgacctgccgagtaggcagctgagaat

SEQ ID NO: 441 - DNA, 28 bp, Pseudoalteromonas nigrifaciens
  Pseudoalteromonas nigrifaciens NCTC10691
gtgacctgccgtataggcagctgaagat

SEQ ID NO: 442 - DNA, 28 bp, Pseudoalteromonas nigrifaciens
  Pseudoalteromonas nigrifaciens NCTC10691
taattctgccgaaaaggcagtgagtaaa

SEQ ID NO: 443 - DNA, 32 bp, Pseudoalteromonas nigrifaciens; identical to SEQ ID NO: 312
  Pseudoalteromonas nigrifaciens NCTC10691

SEQ ID NO: 444 - DNA, 32 bp, Pseudoalteromonas nigrifaciens; identical to SEQ ID NO: 313
  Pseudoalteromonas nigrifaciens NCTC10691

SEQ ID NO: 445 - DNA, 32 bp, Pseudoalteromonas nigrifaciens; identical to SEQ ID NO: 314
  Pseudoalteromonas nigrifaciens NCTC10691

SEQ ID NO: 446 - DNA, 31 bp, Pseudoalteromonas nigrifaciens; identical to SEQ ID NO: 315
  Pseudoalteromonas nigrifaciens NCTC10691

SEQ ID NO: 447 - DNA, 31 bp, Pseudoalteromonas nigrifaciens; identical to SEQ ID NO: 316
  Pseudoalteromonas nigrifaciens NCTC10691

SEQ ID NO: 448 - DNA, 28 bp, Vibrio vulnificus
  Vibrio vulnificus A14
gtgtcctgccgtgtaggcagctaagaaa

SEQ ID NO: 449 - DNA, 28 bp, Vibrio vulnificus
  Vibrio vulnificus A14
gtgtcctgccgcataggcagccaagaat

SEQ ID NO: 450 - DNA, 28 bp, Vibrio vulnificus
  Vibrio vulnificus A14
cctacctgttgaacaagcagttaataat

SEQ ID NO: 451 - DNA, 32 bp, Vibrio vulnificus
  Vibrio vulnificus A14
tcaaatatccgcgcagcacagtcgcgtgagat

SEQ ID NO: 452 - DNA, 32 bp, Vibrio vulnificus
  Vibrio vulnificus A14
atatcagcaatagctagcatactcactgtgtc

SEQ ID NO: 453 - DNA, 18 bp, Vibrio vulnificus
  Vibrio vulnificus A14
aggtcaggaagaaagcaa

SEQ ID NO: 454 - DNA, 18 bp, Vibrio vulnificus
  Vibrio vulnificus A14
aggtccggaaggaagcag

SEQ ID NO: 455 - DNA, 28 bp, Vibrio vulnificus
  Vibrio vulnificus 95-8-7
gtgtcctgccgtgtaggcagctaagaaa

SEQ ID NO: 456 - DNA, 28 bp, Vibrio vulnificus
  Vibrio vulnificus 95-8-7
gtgtcctgccgcataggcagccaagaat

SEQ ID NO: 457 - DNA, 28 bp, Vibrio vulnificus
  Vibrio vulnificus 95-8-7
cctacctgttgaacaagcagttaataat

SEQ ID NO: 458 - DNA, 32 bp, Vibrio vulnificus; identical to SEQ ID NO: 451
  Vibrio vulnificus 95-8-7

SEQ ID NO: 459 - DNA, 32 bp, Vibrio vulnificus; identical to SEQ ID NO: 452
  Vibrio vulnificus 95-8-7

SEQ ID NO: 460 - DNA, 18 bp, Vibrio vulnificus
  Vibrio vulnificus 95-8-7
aggtcaggaagaaagcaa

SEQ ID NO: 461 - DNA, 18 bp, Vibrio vulnificus
  Vibrio vulnificus 95-8-7
aggtccggaaggaagcag

SEQ ID NO: 462 - DNA, 28 bp, Vibrio parahaemolyticus
  Vibrio parahaemolyticus UCM-V493
gtgatctgccgcataggcagtcaagaaa

SEQ ID NO: 463 - DNA, 28 bp, Vibrio parahaemolyticus
  Vibrio parahaemolyticus UCM-V493
gtgatctgccgcataggcagctaagaat

SEQ ID NO: 464 - DNA, 28 bp, Vibrio parahaemolyticus
  Vibrio parahaemolyticus UCM-V493
cctacctgctgaacaagcagtttttatt

SEQ ID NO: 465 - DNA, 32 bp, Vibrio parahaemolyticus; identical to SEQ ID NO: 82
  Vibrio parahaemolyticus UCM-V493

SEQ ID NO: 466 - DNA, 18 bp, Vibrio parahaemolyticus
  Vibrio parahaemolyticus UCM-V493
aggtctggaagaaaacaa

SEQ ID NO: 467 - DNA, 18 bp, Vibrio parahaemolyticus
  Vibrio parahaemolyticus UCM-V493
aggtccggaaggaagcag

SEQ ID NO: 468 - DNA, 28 bp, Vibrio splendidus
  Vibrio splendidus FF_139
gtgtcctgccgcataggcagctaagaaa

SEQ ID NO: 469 - DNA, 28 bp, Vibrio splendidus
  Vibrio splendidus FF_139
gtgtcctgccgcataggcagctaagaat

SEQ ID NO: 470 - DNA, 28 bp, Vibrio splendidus
  Vibrio splendidus FF_139
ccaacctgctgaacaagcagttaaaatc

SEQ ID NO: 471 - DNA, 28 bp, Vibrio splendidus
  Vibrio splendidus FF_139
aaaacaagctggatagacagcctaaaaa

SEQ ID NO: 472 - DNA, 28 bp, Vibrio splendidus
  Vibrio splendidus FF_139
aatggccaccaaataggcagccattgtg

SEQ ID NO: 473 - DNA, 32 bp, Vibrio splendidus
  Vibrio splendidus FF_139
acccgcattttttgaaaaaacgggcaagttgc

SEQ ID NO: 474 - DNA, 18 bp, Vibrio splendidus
  Vibrio splendidus FF_139
aggccaggaagaaagcaa

SEQ ID NO: 475 - DNA, 30 bp, Vibrio splendidus
  Vibrio splendidus FF_139
cagaaatcttgctgattcaacacaaacaaa

SEQ ID NO: 476 - DNA, 28 bp, Vibrio splendidus
  Vibrio splendidus FF_139
gtgtcctaccgaataggcagctaagaat

SEQ ID NO: 477 - DNA, 28 bp, Vibrio splendidus
  Vibrio splendidus FF_139
gtgtcctgccgaataggcagctaagaat

SEQ ID NO: 478 - DNA, 28 bp, Vibrio splendidus
  Vibrio splendidus FF_139
ccttcctgctgaacaagcagttaataat

SEQ ID NO: 479 - DNA, 32 bp, Vibrio splendidus
  Vibrio splendidus FF_139
accagcctttgacgatcgtttccatgggcagt

SEQ ID NO: 480 - DNA, 18 bp, Vibrio splendidus
  Vibrio splendidus FF_139
aggcctggaagggagcag

SEQ ID NO: 481 - DNA, 28 bp, Vibrio lentus
  Vibrio lentus 10N.261.52.F1
gtgtcctgccgaataggcagctaagaaa

SEQ ID NO: 482 - DNA, 28 bp, Vibrio lentus
  Vibrio lentus 10N.261.52.F1
gtgtcctgccgaataggcagctaagaat

SEQ ID NO: 483 - DNA, 28 bp, Vibrio lentus
  Vibrio lentus 10N.261.52.F1
ccaacctgctgaacaagcagctaagaat

SEQ ID NO: 484 - DNA, 32 bp, Vibrio lentus
  Vibrio lentus 10N.261.52.F1
tcacagtgcgctttcacatactgcaagtactc

SEQ ID NO: 485 - DNA, 18 bp, Vibrio lentus
  Vibrio lentus 10N.261.52.F1
aggccaggaagaaagcaa

SEQ ID NO: 486 - DNA, 18 bp, Vibrio lentus
  Vibrio lentus 10N.261.52.F1
aggcctggaagggagcag

SEQ ID NO: 487 - DNA, 28 bp, Vibrio lentus
  Vibrio lentus 10N.286.51.F12
gtgtcctgccgaataggcagctaagaaa

SEQ ID NO: 488 - DNA, 28 bp, Vibrio lentus
  Vibrio lentus 10N.286.51.F12
gtgtcctgccgaataggcagctaagaat

SEQ ID NO: 489 - DNA, 28 bp, Vibrio lentus
  Vibrio lentus 10N.286.51.F12
ccttcctgctgaacaagcagttaataat

SEQ ID NO: 490 - DNA, 32 bp, Vibrio lentus; identical to SEQ ID NO: 344
  Vibrio lentus 10N.286.51.F12

SEQ ID NO: 491 - DNA, 18 bp, Vibrio lentus
  Vibrio lentus 10N.286.51.F12
aggccaggaagaaagcaa

SEQ ID NO: 492 - DNA, 18 bp, Vibrio lentus
  Vibrio lentus 10N.286.51.F12
aggcctggaagggagcag

SEQ ID NO: 493 - DNA, 28 bp, Vibrio cyclitrophicus
  Vibrio cyclitrophicus 10N.286.54.E5
gtgtcctgccgaataggcagctaagaaa

SEQ ID NO: 494 - DNA, 28 bp, Vibrio cyclitrophicus
  Vibrio cyclitrophicus 10N.286.54.E5
gtgtcctgccgaataggcagctaagaat

SEQ ID NO: 495 - DNA, 28 bp, Vibrio cyclitrophicus
  Vibrio cyclitrophicus 10N.286.54.E5
ccttcctgctgaacaagcagttaataat

SEQ ID NO: 496 - DNA, 32 bp, Vibrio cyclitrophicus
  Vibrio cyclitrophicus 10N.286.54.E5
ggtggcacaatggagttcgaatcacaaacaat

SEQ ID NO: 497 - DNA, 18 bp, Vibrio cyclitrophicus
  Vibrio cyclitrophicus 10N.286.54.E5
aggccaggaagaaagcaa

SEQ ID NO: 498 - DNA, 18 bp, Vibrio cyclitrophicus
  Vibrio cyclitrophicus 10N.286.54.E5
aggcctggaagggagcag

SEQ ID NO: 499 - DNA, 28 bp, Vibrio crassostreae
  Vibrio crassostreae 34_P_122
gtgacctgccgcataggcagctaagaat

SEQ ID NO: 500 - DNA, 28 bp, Vibrio crassostreae
  Vibrio crassostreae 34_P_122
ccttcctgctgaacaagcagttaaaatc

SEQ ID NO: 501 - DNA, 32 bp, Vibrio crassostreae; identical to SEQ ID NO: 395
  Vibrio crassostreae 34_P_122

SEQ ID NO: 502 - DNA, 18 bp, Vibrio crassostreae
  Vibrio crassostreae 34_P_122
aggccaggaagaaagcaa

SEQ ID NO: 503 - DNA, 18 bp, Vibrio crassostreae
  Vibrio crassostreae 34_P_122
aggcctggaagggagcag

SEQ ID NO: 504 - DNA, 28 bp, Oleiphilus messinensis
  Oleiphilus messinensis DSM 13489
gtgatctgccgcataggcagttggtaat

SEQ ID NO: 505 - DNA, 28 bp, Oleiphilus messinensis
  Oleiphilus messinensis DSM 13489
gtgatctgctgcgtaggcagttggcaaa

SEQ ID NO: 506 - DNA, 28 bp, Oleiphilus messinensis
  Oleiphilus messinensis DSM 13489
cagctctgccgaataggcagttggtaat

SEQ ID NO: 507 - DNA, 28 bp, Oleiphilus messinensis
  Oleiphilus messinensis DSM 13489
attatctgccgaataggcagttgacgaa

SEQ ID NO: 508 - DNA, 32 bp, Oleiphilus messinensis
  Oleiphilus messinensis DSM 13489
ttcagggtgacggaagccgatgtcgtgaccgg

SEQ ID NO: 509 - DNA, 31 bp, Oleiphilus messinensis
  Oleiphilus messinensis DSM 13489
actggttaatacctcagatgacgaggcgttt

SEQ ID NO: 510 - DNA, 33 bp, Oleiphilus messinensis
  Oleiphilus messinensis DSM 13489
caggttcgtttaaaactgcgtctgctgtgtggt

SEQ ID NO: 511 - DNA, 32 bp, Oleiphilus messinensis
  Oleiphilus messinensis DSM 13489
ttgtagcccgtcgaggcgcgattaacgaagcc

SEQ ID NO: 512 - DNA, 32 bp, Oleiphilus messinensis
  Oleiphilus messinensis DSM 13489
cgatgcaatgacaagatctgcgtcagtatagc

SEQ ID NO: 513 - DNA, 32 bp, Oleiphilus messinensis
  Oleiphilus messinensis DSM 13489
aatcaccaaggttagttactatttgaatacgt

SEQ ID NO: 514 - DNA, 32 bp, Oleiphilus messinensis
  Oleiphilus messinensis DSM 13489
agcggtttgatttcgatgaggtaggtgcccgg

SEQ ID NO: 515 - DNA, 31 bp, Oleiphilus messinensis
  Oleiphilus messinensis DSM 13489
gctctgacagcttcagtgagcactgaaatgc

SEQ ID NO: 516 - DNA, 32 bp, Oleiphilus messinensis
  Oleiphilus messinensis DSM 13489
ttcgttggaattaaaacctcataggtttgcaa

SEQ ID NO: 517 - DNA, 32 bp, Oleiphilus messinensis
  Oleiphilus messinensis DSM 13489
aagcccaacctacctctacatgtgagcgctac

SEQ ID NO: 518 - DNA, 32 bp, Oleiphilus messinensis
  Oleiphilus messinensis DSM 13489
aagcccaacctgcctctgcatgtgatcgccac

SEQ ID NO: 519 - DNA, 28 bp, Vibrio azureus
  Vibrio azureus LC2-005
ctgtactgccgcataggtagctaagaaa

SEQ ID NO: 520 - DNA, 28 bp, Vibrio azureus
  Vibrio azureus LC2-005
ctgtactgccgcataggtagttaagagt

SEQ ID NO: 521 - DNA, 28 bp, Vibrio azureus
  Vibrio azureus LC2-005
aaagactgccgaaaaggtagtttatacg

SEQ ID NO: 522 - DNA, 32 bp, Vibrio azureus
  Vibrio azureus LC2-005
agtgatcgattggcactatcatatgcagtttc

SEQ ID NO: 523 - DNA, 32 bp, Vibrio azureus
  Vibrio azureus LC2-005
atgacgatgctgataatgatagtcacattgaa

SEQ ID NO: 524 - DNA, 32 bp, Vibrio azureus
  Vibrio azureus LC2-005
atgttaaaaaaccactcaggaataacaccaga

SEQ ID NO: 525 - DNA, 32 bp, Vibrio azureus
  Vibrio azureus LC2-005
atgtttaagaaatactcaggaatgacacctga

SEQ ID NO: 526 - DNA, 28 bp, Vibrio splendidus
  Vibrio splendidus 10N.286.52.C6
gtgatctgccgcataggcagctaagaaa

SEQ ID NO: 527 - DNA, 28 bp, Vibrio splendidus
  Vibrio splendidus 10N.286.52.C6
gtgtcctgccgtataggcagttaagaat

SEQ ID NO: 528 - DNA, 28 bp, Vibrio splendidus
  Vibrio splendidus 10N.286.52.C6
ccttcctgctgaacaagcagttagaata

SEQ ID NO: 529 - DNA, 32 bp, Vibrio splendidus
  Vibrio splendidus 10N.286.52.C6
actactagacctagccgtttacaagttcattg

SEQ ID NO: 530 - DNA, 18 bp, Vibrio splendidus
  Vibrio splendidus 10N.286.52.C6
aggccaggaagaaagcaa

SEQ ID NO: 531 - DNA, 18 bp, Vibrio splendidus
  Vibrio splendidus 10N.286.52.C6
aggcctggaagggagcag

SEQ ID NO: 532 - DNA, 28 bp, Vibrio splendidus
  Vibrio splendidus 10N.261.46.B10
gtgtcctgccgcataggcagctaagaaa

SEQ ID NO: 533 - DNA, 28 bp, Vibrio splendidus
  Vibrio splendidus 10N.261.46.B10
gtgtcctgccgcataggcagctaagaat

SEQ ID NO: 534 - DNA, 28 bp, Vibrio splendidus
  Vibrio splendidus 10N.261.46.B10
ccttcctgctgaacaagcagttaaaatc

SEQ ID NO: 535 - DNA, 32 bp, Vibrio splendidus
  Vibrio splendidus 10N.261.46.B10
gactggtgtggctagctcgttcaatagtaatg

SEQ ID NO: 536 - DNA, 18 bp, Vibrio splendidus
  Vibrio splendidus 10N.261.46.B10
aggccaggaagaaagcaa

SEQ ID NO: 537 - DNA, 18 bp, Vibrio splendidus
  Vibrio splendidus 10N.261.46.B10
aggcctggaagggagcag

SEQ ID NO: 538 - DNA, 28 bp, Vibrio sp.
  Vibrio sp. EJY3
gtgacctgccgagtaggcagctaagaaa

SEQ ID NO: 539 - DNA, 28 bp, Vibrio sp.
  Vibrio sp. EJY3
aaaccctgccgaataggtagtttgaatt

SEQ ID NO: 540 - DNA, 32 bp, Vibrio sp.
  Vibrio sp. EJY3
tcggtgttttcttacccgcttagtaataggat

SEQ ID NO: 541 - DNA, 22 bp, Vibrio sp.
  Vibrio sp. EJY3
atgttaaaaaaatactcaggta

SEQ ID NO: 542 - DNA, 22 bp, Vibrio sp.
  Vibrio sp. EJY3
atgtttaagaaatactccggca

SEQ ID NO: 543 - DNA, 28 bp, Vibrio cyclitrophicus
  Vibrio cyclitrophicus 1F97
gtgtcctgccgcataggcagctaagaaa

SEQ ID NO: 544 - DNA, 28 bp, Vibrio cyclitrophicus
  Vibrio cyclitrophicus 1F97
gtgtcctgccgcataggcagctaagaat

SEQ ID NO: 545 - DNA, 28 bp, Vibrio cyclitrophicus
  Vibrio cyclitrophicus 1F97
ccttcctgctgaacaagcagttaataat

SEQ ID NO: 546 - DNA, 32 bp, Vibrio cyclitrophicus; identical to SEQ ID NO: 62
  Vibrio cyclitrophicus 1F97

SEQ ID NO: 547 - DNA, 18 bp, Vibrio cyclitrophicus
  Vibrio cyclitrophicus 1F97
aggccaggaagaaagcaa

SEQ ID NO: 548 - DNA, 28 bp, Photobacterium phosphoreum
  Photobacterium phosphoreum FS-1.2
gtgaacagccgcataggcagctaagaaa

SEQ ID NO: 549 - DNA, 28 bp, Photobacterium phosphoreum
  Photobacterium phosphoreum FS-1.2
tagaacagtcgaatagactgctaagaaa

SEQ ID NO: 550 - DNA, 28 bp, Photobacterium phosphoreum
  Photobacterium phosphoreum FS-1.2
ataaacagctgaacaagcagatagtagt

SEQ ID NO: 551 - DNA, 32 bp, Photobacterium phosphoreum
  Photobacterium phosphoreum FS-1.2
tttctgtaatttccctctgaaggatcttttat

SEQ ID NO: 552 - DNA, 33 bp, Photobacterium phosphoreum
  Photobacterium phosphoreum FS-1.2
tgccgtctaggtagttgagattatgcctagggc

SEQ ID NO: 553 - DNA, 21 bp, Photobacterium phosphoreum
  Photobacterium phosphoreum FS-1.2
aggcttggaagagagcagcca

SEQ ID NO: 554 - DNA, 21 bp, Photobacterium phosphoreum
  Photobacterium phosphoreum FS-1.2
aggcccggaagggagcaaccg

SEQ ID NO: 555 - DNA, 28 bp, Vibrio tapetis
  Vibrio tapetis -
gtgacctgccgaataggcagctaggaaa

SEQ ID NO: 556 - DNA, 28 bp, Vibrio tapetis
  Vibrio tapetis -
gtgacctgccgaataggcagttaagaat

SEQ ID NO: 557 - DNA, 28 bp, Vibrio tapetis
  Vibrio tapetis -
ccagcctgctgaacaagcagaatgtaat

SEQ ID NO: 558 - DNA, 31 bp, Vibrio tapetis
  Vibrio tapetis -
cgatacaaaccgttcaaattagaccctaaca

SEQ ID NO: 559 - DNA, 18 bp, Vibrio tapetis
  Vibrio tapetis -
aggcctggaagagagcat

SEQ ID NO: 560 - DNA, 18 bp, Vibrio tapetis
  Vibrio tapetis -
aggcctggaagggagcag

SEQ ID NO: 561 - DNA, 28 bp, Vibrio anguillarum
  Vibrio anguillarum NCTC12159
gtgacctgccgcataggcagccaagaaa

SEQ ID NO: 562 - DNA, 28 bp, Vibrio anguillarum
  Vibrio anguillarum NCTC12159
gtgacctgccgcataggcagctaagaat

SEQ ID NO: 563 - DNA, 28 bp, Vibrio anguillarum
  Vibrio anguillarum NCTC12159
cctgcctgctgaacaagcagttaataaa

SEQ ID NO: 564 - DNA, 32 bp, Vibrio anguillarum
  Vibrio anguillarum NCTC12159
atcatgcgtaacgcttttgcaagttcatcgtt

SEQ ID NO: 565 - DNA, 18 bp, Vibrio anguillarum
  Vibrio anguillarum NCTC12159
aggtcaggaagaaagcaa

SEQ ID NO: 566 - DNA, 18 bp, Vibrio anguillarum
  Vibrio anguillarum NCTC12159
aggcccggaagggagcag

SEQ ID NO: 567 - DNA, 28 bp, Vibrio sp.
  Vibrio sp. 10N.261.45.A1
gtgacctgccgcataggcagctaagaaa

SEQ ID NO: 568 - DNA, 28 bp, Vibrio sp.
  Vibrio sp. 10N.261.45.A1
gtgtcctgccgcataggcagttaagaat

SEQ ID NO: 569 - DNA, 28 bp, Vibrio sp.
  Vibrio sp. 10N.261.45.A1
ccatcctgctgaacaagcagttaataat

SEQ ID NO: 570 - DNA, 32 bp, Vibrio sp.; identical to SEQ ID NO: 275
  Vibrio sp. 10N.261.45.A1

SEQ ID NO: 571 - DNA, 31 bp, Vibrio sp.
  Vibrio sp. 10N.261.45.A1
taattacacgccttgcgaagtttgtattgct

SEQ ID NO: 572 - DNA, 32 bp, Vibrio sp.; identical to SEQ ID NO: 277
  Vibrio sp. 10N.261.45.A1

SEQ ID NO: 573 - DNA, 18 bp, Vibrio sp.
  Vibrio sp. 10N.261.45.A1
aggccaggaagaaagcaa

SEQ ID NO: 574 - DNA, 32 bp, Vibrio sp.; identical to SEQ ID NO: 279
  Vibrio sp. 10N.261.45.A1

SEQ ID NO: 575 - DNA, 28 bp, Vibrio sp.
  Vibrio sp. 10N.261.45.A6
gtgacctgccgcataggcagctaagaaa

SEQ ID NO: 576 - DNA, 28 bp, Vibrio sp.
  Vibrio sp. 10N.261.45.A6
gtgtcctgccgcataggcagttaagaat

SEQ ID NO: 577 - DNA, 28 bp, Vibrio sp.
  Vibrio sp. 10N.261.45.A6
ccatcctgctgaacaagcagttaataat

SEQ ID NO: 578 - DNA, 32 bp, Vibrio sp.; identical to SEQ ID NO: 275
  Vibrio sp. 10N.261.45.A6

SEQ ID NO: 579 - DNA, 31 bp, Vibrio sp.; identical to SEQ ID NO: 571
  Vibrio sp. 10N.261.45.A6

SEQ ID NO: 580 - DNA, 32 bp, Vibrio sp.; identical to SEQ ID NO: 277
  Vibrio sp. 10N.261.45.A6

SEQ ID NO: 581 - DNA, 18 bp, Vibrio sp.
  Vibrio sp. 10N.261.45.A6
aggccaggaagaaagcaa

SEQ ID NO: 582 - DNA, 32 bp, Vibrio sp.
  Vibrio sp. 10N.261.45.A6
ttgtcagatgtttggactaagccaatcttttc

SEQ ID NO: 583 - DNA, 28 bp, Vibrio lentus
  Vibrio lentus 10N.261.48.C12
gtgtcctgccgcataggcagctaagaaa

SEQ ID NO: 584 - DNA, 28 bp, Vibrio lentus
  Vibrio lentus 10N.261.48.C12
gtgtcctgccgcataggcagctaagaat

SEQ ID NO: 585 - DNA, 28 bp, Vibrio lentus
  Vibrio lentus 10N.261.48.C12
ccttcctgctgaacaagcagttaataat

SEQ ID NO: 586 - DNA, 32 bp, Vibrio lentus; identical to SEQ ID NO: 338
  Vibrio lentus 10N.261.48.C12

SEQ ID NO: 587 - DNA, 18 bp, Vibrio lentus
  Vibrio lentus 10N.261.48.C12
aggccaggaagaaagcaa

SEQ ID NO: 588 - DNA, 18 bp, Vibrio lentus
  Vibrio lentus 10N.261.48.C12
aggcctggaagggagcag

SEQ ID NO: 589 - DNA, 28 bp, Vibrio breoganii
  Vibrio breoganii 10N.261.48.E3
gtgtcctgccgcataggcagctaagaaa

SEQ ID NO: 590 - DNA, 28 bp, Vibrio breoganii
  Vibrio breoganii 10N.261.48.E3
gtgtcctgccgcataggcagctaagaat

SEQ ID NO: 591 - DNA, 28 bp, Vibrio breoganii
  Vibrio breoganii 10N.261.48.E3
ccatcctgctgaacaagcagttaataat

SEQ ID NO: 592 - DNA, 32 bp, Vibrio breoganii
  Vibrio breoganii 10N.261.48.E3
tgacgcaatttggcttctttatcagcaatctt

SEQ ID NO: 593 - DNA, 32 bp, Vibrio breoganii
  Vibrio breoganii 10N.261.48.E3
ctcacgctaaccttatttgcctagataactca

SEQ ID NO: 594 - DNA, 18 bp, Vibrio breoganii
  Vibrio breoganii 10N.261.48.E3
aggtctggaagaaagcaa

SEQ ID NO: 595 - DNA, 18 bp, Vibrio breoganii
  Vibrio breoganii 10N.261.48.E3
agatccggaaggaagcag

SEQ ID NO: 596 - DNA, 28 bp, Photobacterium leiognathi
  Photobacterium leiognathi ajapo.3.1
gtgagcagccgtataggccgctaagaaa

SEQ ID NO: 597 - DNA, 28 bp, Photobacterium leiognathi
  Photobacterium leiognathi ajapo.3.1
gtgaatagccgtataggctgttaataga

SEQ ID NO: 598 - DNA, 28 bp, Photobacterium leiognathi
  Photobacterium leiognathi ajapo.3.1
atattcagccgaaaaggccgttgagttt

SEQ ID NO: 599 - DNA, 31 bp, Photobacterium leiognathi
  Photobacterium leiognathi ajapo.3.1
aaagtatgggaacggagaaacggttctttgc

SEQ ID NO: 600 - DNA, 31 bp, Photobacterium leiognathi
  Photobacterium leiognathi ajapo.3.1
cggcaatatcttagcttggaacattaagtat

SEQ ID NO: 601 - DNA, 31 bp, Photobacterium leiognathi
  Photobacterium leiognathi ajapo.3.1
agatattaggaacggagaaacggctctttgc

SEQ ID NO: 602 - DNA, 28 bp, Halomonas sp.
  Halomonas sp. Soap Lake #6
gtaaaccgccgaataggcagctgaaaaa

SEQ ID NO: 603 - DNA, 28 bp, Halomonas sp.
  Halomonas sp. Soap Lake #6
gtgaaccgccgaataggcagctgatatt

SEQ ID NO: 604 - DNA, 28 bp, Halomonas sp.
  Halomonas sp. Soap Lake #6
ggctaaaattgaggcggcagctgatgcc

SEQ ID NO: 605 - DNA, 28 bp, Halomonas sp.
  Halomonas sp. Soap Lake #6
ttgatacgccgcatagccacgcagcggc

SEQ ID NO: 606 - DNA, 32 bp, Halomonas sp.
  Halomonas sp. Soap Lake #6
atgcactatgccgtcatagaagataatgactt

SEQ ID NO: 607 - DNA, 31 bp, Halomonas sp.
  Halomonas sp. Soap Lake #6
gctaacgttgatattagtgaatttgagttaa

SEQ ID NO: 608 - DNA, 32 bp, Halomonas sp.
  Halomonas sp. Soap Lake #6
aggcccggaagggagcaacggtagtggtggct

SEQ ID NO: 609 - DNA, 32 bp, Halomonas sp.
  Halomonas sp. Soap Lake #6
aggactggaagccagcaacggtaatgatacac

SEQ ID NO: 610 - DNA, 28 bp, Pseudoalteromonas sp.
  Pseudoalteromonas sp. S1727
gtgaactgccgagtaggcagctggaaat

SEQ ID NO: 611 - DNA, 28 bp, Pseudoalteromonas sp.
  Pseudoalteromonas sp. S1727
gtgaactgccgagtaggcagctgaagtt

SEQ ID NO: 612 - DNA, 28 bp, Pseudoalteromonas sp.
  Pseudoalteromonas sp. S1727
tttaactgccgaaaaggcagaggctaaa

SEQ ID NO: 613 - DNA, 32 bp, Pseudoalteromonas sp.
  Pseudoalteromonas sp. S1727
cgcttggaaaggacgttctactagaagtagag

SEQ ID NO: 614 - DNA, 33 bp, Pseudoalteromonas sp.
  Pseudoalteromonas sp. S1727
aggccaggaattgaacaaccacaacttgtgact

SEQ ID NO: 615 - DNA, 33 bp, Pseudoalteromonas sp.; identical to SEQ ID NO: 20
  Pseudoalteromonas sp. S1727

SEQ ID NO: 616 - DNA, 28 bp, Pseudoalteromonas sp.
  Pseudoalteromonas sp. S558
gtgaactgccgagtaggcagctggaaat

SEQ ID NO: 617 - DNA, 28 bp, Pseudoalteromonas sp.
  Pseudoalteromonas sp. S558
gtgaactgccgagtaggcagctgaagtt

SEQ ID NO: 618 - DNA, 28 bp, Pseudoalteromonas sp.
  Pseudoalteromonas sp. S558
tttaactgccgaaaaggcagaggctaaa

SEQ ID NO: 619 - DNA, 32 bp, Pseudoalteromonas sp.
  Pseudoalteromonas sp. S558
ggctaaaggatggcggatatctttctttattt

SEQ ID NO: 620 - DNA, 32 bp, Pseudoalteromonas sp.
  Pseudoalteromonas sp. S558
tgaaggtcaaccagatttaacgaaagatggat

SEQ ID NO: 621 - DNA, 33 bp, Pseudoalteromonas sp.; identical to SEQ ID NO: 431
  Pseudoalteromonas sp. S558

SEQ ID NO: 622 - DNA, 33 bp, Pseudoalteromonas sp.; identical to SEQ ID NO: 20
  Pseudoalteromonas sp. S558

SEQ ID NO: 623 - DNA, 28 bp, Vibrio sp.
  Vibrio sp. BEI176
gtgtcctgccgaataggcagctaagaaa

SEQ ID NO: 624 - DNA, 28 bp, Vibrio sp.
  Vibrio sp. BEI176
gcgttctgccgcataggcagctaagaaa

SEQ ID NO: 625 - DNA, 28 bp, Vibrio sp.
  Vibrio sp. BEI176
gtgttctgccgcataggcagttaagaaa

SEQ ID NO: 626 - DNA, 28 bp, Vibrio sp.
  Vibrio sp. BEI176
gtgtcctgccgtataggcagctaagaat

SEQ ID NO: 627 - DNA, 28 bp, Vibrio sp.
  Vibrio sp. BEI176
cctacctgctgaacaagcagcctataat

SEQ ID NO: 628 - DNA, 28 bp, Vibrio sp.
  Vibrio sp. BEI176
cccaactgccgcaagtaccccatccgct

SEQ ID NO: 629 - DNA, 28 bp, Vibrio sp.
  Vibrio sp. BEI176
aacctctgccataaaggcagcttctttg

SEQ ID NO: 630 - DNA, 32 bp, Vibrio sp.
  Vibrio sp. BEI176
ttatcaagtagcgaatgttggtgatgtttacg

SEQ ID NO: 631 - DNA, 32 bp, Vibrio sp.
  Vibrio sp. BEI176
aaacgtatatcttcaaaatgatttttttggta

SEQ ID NO: 632 - DNA, 31 bp, Vibrio sp.
  Vibrio sp. BEI176
atgtgctcgttggaagatctagactaatagc

SEQ ID NO: 633 - DNA, 18 bp, Vibrio sp.
  Vibrio sp. BEI176
aggtcaggaagaaagcaa

SEQ ID NO: 634 - DNA, 35 bp, Vibrio sp.
  Vibrio sp. BEI176
acctctgtcactttcaatatcggtaacctagagct

SEQ ID NO: 635 - DNA, 18 bp, Vibrio sp.
  Vibrio sp. BEI176
aggtccggaaggaagcag

SEQ ID NO: 636 - DNA, 28 bp, Vibrio alginolyticus
  Vibrio alginolyticus 12G01
gtgtcctgccgcataggcagctaaaaat

SEQ ID NO: 637 - DNA, 28 bp, Vibrio alginolyticus
  Vibrio alginolyticus 12G01
gtgtcctgccgcataggcagctaagaat

SEQ ID NO: 638 - DNA, 28 bp, Vibrio alginolyticus
  Vibrio alginolyticus 12G01
ccgacctgctgaacaagcagttagaagc

SEQ ID NO: 639 - DNA, 32 bp, Vibrio alginolyticus
  Vibrio alginolyticus 12G01
aactagtaaatacactcgaaacatcattatta

SEQ ID NO: 640 - DNA, 18 bp, Vibrio alginolyticus
  Vibrio alginolyticus 12G01
aggtcaggaagaaaacaa

SEQ ID NO: 641 - DNA, 18 bp, Vibrio alginolyticus
  Vibrio alginolyticus 12G01
aggtccggaaggaagcag

SEQ ID NO: 642 - DNA, 28 bp, Pseudoalteromonas sp.
  Pseudoalteromonas sp. P1-11
gtgacctgccgtataggcagctgaaaat

SEQ ID NO: 643 - DNA, 28 bp, Pseudoalteromonas sp.
  Pseudoalteromonas sp. P1-11
gtgacctgccgtataggcagctgagaat

SEQ ID NO: 644 - DNA, 28 bp, Pseudoalteromonas sp.
  Pseudoalteromonas sp. P1-11
gtgacctgccgtataggcagctgaagat

SEQ ID NO: 645 - DNA, 28 bp, Pseudoalteromonas sp.
  Pseudoalteromonas sp. P1-11
taattctgccgaaaaggcagtgagtagt

SEQ ID NO: 646 - DNA, 32 bp, Pseudoalteromonas sp.
  Pseudoalteromonas sp. P1-11
tgtatgcgctgcatgcggacgaaacacaagaa

SEQ ID NO: 647 - DNA, 32 bp, Pseudoalteromonas sp.
  Pseudoalteromonas sp. P1-11
gtgaaagccaccagctattggcgtaatagtaa

SEQ ID NO: 648 - DNA, 32 bp, Pseudoalteromonas sp.
  Pseudoalteromonas sp. P1-11
tgcgaaaatgagtacgcctttgctactggacc

SEQ ID NO: 649 - DNA, 31 bp, Pseudoalteromonas sp.; identical to SEQ ID NO: 315
  Pseudoalteromonas sp. P1-11

SEQ ID NO: 650 - DNA, 31 bp, Pseudoalteromonas sp.
  Pseudoalteromonas sp. P1-11
aaaaagaaccgttttgatgtgtatgtaaaag

SEQ ID NO: 651 - DNA, 28 bp, Pseudoalteromonas sp.
  Pseudoalteromonas sp. P1-25
gtgaactgccgagtaggtagctggaaat

SEQ ID NO: 652 - DNA, 28 bp, Pseudoalteromonas sp.
  Pseudoalteromonas sp. P1-25
gtgaactgccgagtaggcagctgaagtt

SEQ ID NO: 653 - DNA, 28 bp, Pseudoalteromonas sp.
  Pseudoalteromonas sp. P1-25
tttaactgccgaaaaggcagaggctaaa

SEQ ID NO: 654 - DNA, 32 bp, Pseudoalteromonas sp.
  Pseudoalteromonas sp. P1-25
tatttgaatgtcatttataacacgttgttggt

SEQ ID NO: 655 - DNA, 32 bp, Pseudoalteromonas sp.
  Pseudoalteromonas sp. P1-25
agaaatggtaagtatcgttcaagaaaagttta

SEQ ID NO: 656 - DNA, 33 bp, Pseudoalteromonas sp.
  Pseudoalteromonas sp. P1-25
aggccaggaagtaaacaaccacaacttgtgact

SEQ ID NO: 657 - DNA, 33 bp, Pseudoalteromonas sp.; identical to SEQ ID NO: 20
  Pseudoalteromonas sp. P1-25

SEQ ID NO: 658 - DNA, 28 bp, Photobacterium aquae
  Photobacterium aquae CGMCC 1.12159
gtgccctgccgagtaggcagccagaaaa

SEQ ID NO: 659 - DNA, 28 bp, Photobacterium aquae
  Photobacterium aquae CGMCC 1.12159
gtgccctgccgtataggcagttaaaaat

SEQ ID NO: 660 - DNA, 28 bp, Photobacterium aquae
  Photobacterium aquae CGMCC 1.12159
actacctactgaataagtagctgagaat

SEQ ID NO: 661 - DNA, 28 bp, Photobacterium aquae
  Photobacterium aquae CGMCC 1.12159
ccaacctgctgaaaaagcagtatttaac

SEQ ID NO: 662 - DNA, 32 bp, Photobacterium aquae
  Photobacterium aquae CGMCC 1.12159
aacagcaatcaatccagccatcattaatataa

SEQ ID NO: 663 - DNA, 32 bp, Photobacterium aquae
  Photobacterium aquae CGMCC 1.12159
acgaaactgtaccgttcattgacgttaaatgg

SEQ ID NO: 664 - DNA, 32 bp, Photobacterium aquae
  Photobacterium aquae CGMCC 1.12159
gacgagcagccaatggcaagatcacacgaaca

SEQ ID NO: 665 - DNA, 32 bp, Photobacterium aquae
  Photobacterium aquae CGMCC 1.12159
ggaaaagcagtcgagattaggcctgaaagtaa

SEQ ID NO: 666 - DNA, 18 bp, Photobacterium aquae
  Photobacterium aquae CGMCC 1.12159
aggccaggatgagagcag

SEQ ID NO: 667 - DNA, 18 bp, Photobacterium aquae
  Photobacterium aquae CGMCC 1.12159
aggcctggaagggagcag

SEQ ID NO: 668 - DNA, 28 bp, Photobacterium ganghwense
  Photobacterium ganghwense DSM 22954
gtgacctgccggataggcagctgagaaa

SEQ ID NO: 669 - DNA, 28 bp, Photobacterium ganghwense
  Photobacterium ganghwense DSM 22954
gtgacctgccggataggcagttgagata

SEQ ID NO: 670 - DNA, 28 bp, Photobacterium ganghwense
  Photobacterium ganghwense DSM 22954
aagacctgccgtggaggcagccaatgat

SEQ ID NO: 671 - DNA, 32 bp, Photobacterium ganghwense
  Photobacterium ganghwense DSM 22954
tcctggtggaagcatacgcatggcgatattaa

SEQ ID NO: 672 - DNA, 32 bp, Photobacterium ganghwense
  Photobacterium ganghwense DSM 22954
gtgttgcggtttatgaatatgacattgtggca

SEQ ID NO: 673 - DNA, 34 bp, Photobacterium ganghwense
  Photobacterium ganghwense DSM 22954
aggccaagaagtaaacaacctcaacagacaacat

SEQ ID NO: 674 - DNA, 34 bp, Photobacterium ganghwense
  Photobacterium ganghwense DSM 22954
aggcccggaagggagcagccgcagcaaatgacgt

SEQ ID NO: 675 - DNA, 28 bp, Vibrio vulnificus
  Vibrio vulnificus VA-WGS-18042
gtgccctgctgcataggcagtcaagaaa

SEQ ID NO: 676 - DNA, 28 bp, Vibrio vulnificus
  Vibrio vulnificus VA-WGS-18042
gtgacctgccgcataggcagccaagaat

SEQ ID NO: 677 - DNA, 28 bp, Vibrio vulnificus
  Vibrio vulnificus VA-WGS-18042
cctacctgctgaacaagcagttaataat

SEQ ID NO: 678 - DNA, 32 bp, Vibrio vulnificus
  Vibrio vulnificus VA-WGS-18042
aaaaggctatcttgttcggtgatagtgtcact

SEQ ID NO: 679 - DNA, 18 bp, Vibrio vulnificus
  Vibrio vulnificus VA-WGS-18042
aggtcgggaagaaagcag

SEQ ID NO: 680 - DNA, 18 bp, Vibrio vulnificus
  Vibrio vulnificus VA-WGS-18042
aggtccggaaggaagcag

SEQ ID NO: 681 - DNA, 28 bp, Vibrio cholerae
  Vibrio cholerae P7-CHT61-04
gtgttctgccgaataggcagccaagaaa

SEQ ID NO: 682 - DNA, 28 bp, Vibrio cholerae
  Vibrio cholerae P7-CHT61-04
gtgttctgccgaataggcagccaagaat

SEQ ID NO: 683 - DNA, 28 bp, Vibrio cholerae
  Vibrio cholerae P7-CHT61-04
cctacctgctgaacaagcagttaataat

SEQ ID NO: 684 - DNA, 32 bp, Vibrio cholerae; identical to SEQ ID NO: 407
  Vibrio cholerae P7-CHT61-04

SEQ ID NO: 685 - DNA, 32 bp, Vibrio cholerae; identical to SEQ ID NO: 409
  Vibrio cholerae P7-CHT61-04

SEQ ID NO: 686 - DNA, 18 bp, Vibrio cholerae
  Vibrio cholerae P7-CHT61-04
aggtcaggaagaaagcaa

SEQ ID NO: 687 - DNA, 18 bp, Vibrio cholerae
  Vibrio cholerae P7-CHT61-04
agatccggaaggaagcag

SEQ ID NO: 688 - DNA, 28 bp, Vibrio cholerae
  Vibrio cholerae A12JL36W17
gtgttctgccgaataggcagccaagaaa

SEQ ID NO: 689 - DNA, 28 bp, Vibrio cholerae
  Vibrio cholerae A12JL36W17
gtgttctgccgaataggcagccaagaat

SEQ ID NO: 690 - DNA, 28 bp, Vibrio cholerae
  Vibrio cholerae A12JL36W17
cctacctgctgaacaagcagttaataat

SEQ ID NO: 691 - DNA, 32 bp, Vibrio cholerae; identical to SEQ ID NO: 409
  Vibrio cholerae A12JL36W17

SEQ ID NO: 692 - DNA, 18 bp, Vibrio cholerae
  Vibrio cholerae A12JL36W17
aggtcaggaagaaagcaa

SEQ ID NO: 693 - DNA, 18 bp, Vibrio cholerae
  Vibrio cholerae A12JL36W17
agatccggaaggaagcag

SEQ ID NO: 694 - DNA, 28 bp, Pseudoalteromonas sp.
  Pseudoalteromonas sp. -
gtgaactgccgaataggtagctggaaat

SEQ ID NO: 695 - DNA, 28 bp, Pseudoalteromonas sp.
  Pseudoalteromonas sp. -
gtgaactgccgagtaggtagctggaaat

SEQ ID NO: 696 - DNA, 28 bp, Pseudoalteromonas sp.
  Pseudoalteromonas sp. -
atcttctgccgaataggcagctgaaatt

SEQ ID NO: 697 - DNA, 28 bp, Pseudoalteromonas sp.
  Pseudoalteromonas sp. -
tttaactgccgaaaaggcagaggctaaa

SEQ ID NO: 698 - DNA, 32 bp, Pseudoalteromonas sp.
  Pseudoalteromonas sp. -
tgagtgcaagaaagtagaggggaattggaatt

SEQ ID NO: 699 - DNA, 32 bp, Pseudoalteromonas sp.
  Pseudoalteromonas sp. -
ttagaaaatagtcgtgtagttcctacacgtgt

SEQ ID NO: 700 - DNA, 33 bp, Pseudoalteromonas sp.; identical to SEQ ID NO: 656
  Pseudoalteromonas sp. -

SEQ ID NO: 701 - DNA, 33 bp, Pseudoalteromonas sp.; identical to SEQ ID NO: 20
  Pseudoalteromonas sp. -

SEQ ID NO: 702 - DNA, 28 bp, Vibrio parahaemolyticus
  Vibrio parahaemolyticus CFSAN007440
ggtatctgccgcataggcagtcaagaaa

SEQ ID NO: 703 - DNA, 28 bp, Vibrio parahaemolyticus
  Vibrio parahaemolyticus CFSAN007440
gtgatctgccgcataggcagctaagaat

SEQ ID NO: 704 - DNA, 28 bp, Vibrio parahaemolyticus
  Vibrio parahaemolyticus CFSAN007440
cctacctgctgaacaagcagtttttatt

SEQ ID NO: 705 - DNA, 32 bp, Vibrio parahaemolyticus; identical to SEQ ID NO: 82
  Vibrio parahaemolyticus CFSAN007440

SEQ ID NO: 706 - DNA, 18 bp, Vibrio parahaemolyticus
  Vibrio parahaemolyticus CFSAN007440
aggtctggaagaaaacaa

SEQ ID NO: 707 - DNA, 18 bp, Vibrio parahaemolyticus
  Vibrio parahaemolyticus CFSAN007440
aggtccggaaggaagcag

SEQ ID NO: 708 - DNA, 28 bp, Vibrio navarrensis
  Vibrio navarrensis ATCC 51183
gtgtcctgccgtgtaggcagctaagaaa

SEQ ID NO: 709 - DNA, 28 bp, Vibrio navarrensis
  Vibrio navarrensis ATCC 51183
gtgtcctgccgcataggcagccaataat

SEQ ID NO: 710 - DNA, 28 bp, Vibrio navarrensis
  Vibrio navarrensis ATCC 51183
gtgacctgccgcataggcagccaagaat

SEQ ID NO: 711 - DNA, 28 bp, Vibrio navarrensis
  Vibrio navarrensis ATCC 51183
cctacctgctgaacaagcagttaataat

SEQ ID NO: 712 - DNA, 32 bp, Vibrio navarrensis; identical to SEQ ID NO: 31
  Vibrio navarrensis ATCC 51183

SEQ ID NO: 713 - DNA, 32 bp, Vibrio navarrensis; identical to SEQ ID NO: 32
  Vibrio navarrensis ATCC 51183

SEQ ID NO: 714 - DNA, 18 bp, Vibrio navarrensis
  Vibrio navarrensis ATCC 51183
aggtcaggaagaaagcaa

SEQ ID NO: 715 - DNA, 18 bp, Vibrio navarrensis
  Vibrio navarrensis ATCC 51183
aggtccggaaggaagcag

SEQ ID NO: 716 - DNA, 28 bp, Vibrio parahaemolyticus
  Vibrio parahaemolyticus 9.5357
ggtatctgccgcataggcagtcaagaaa

SEQ ID NO: 717 - DNA, 28 bp, Vibrio parahaemolyticus
  Vibrio parahaemolyticus 9.5357
gtgatctgccgcataggcagctaagaat

SEQ ID NO: 718 - DNA, 28 bp, Vibrio parahaemolyticus
  Vibrio parahaemolyticus 9.5357
cctacctgctgaacaagcagtttttatt

SEQ ID NO: 719 - DNA, 32 bp, Vibrio parahaemolyticus; identical to SEQ ID NO: 82
  Vibrio parahaemolyticus 9.5357

SEQ ID NO: 720 - DNA, 18 bp, Vibrio parahaemolyticus
  Vibrio parahaemolyticus 9.5357
aggtctggaagaaaacaa

SEQ ID NO: 721 - DNA, 18 bp, Vibrio parahaemolyticus
  Vibrio parahaemolyticus 9.5357
aggtccggaaggaagcag

SEQ ID NO: 722 - DNA, 28 bp, Vibrio parahaemolyticus
  Vibrio parahaemolyticus 856038
gtcacctgtcgcatagacagccaagaat

SEQ ID NO: 723 - DNA, 28 bp, Vibrio parahaemolyticus
  Vibrio parahaemolyticus 856038
gtgacctgccgcataggcagccaagaat

SEQ ID NO: 724 - DNA, 28 bp, Vibrio parahaemolyticus
  Vibrio parahaemolyticus 856038
cctacctgttgaacaagcagttaataat

SEQ ID NO: 725 - DNA, 31 bp, Vibrio parahaemolyticus; identical to SEQ ID NO: 44
  Vibrio parahaemolyticus 856038

SEQ ID NO: 726 - DNA, 18 bp, Vibrio parahaemolyticus
  Vibrio parahaemolyticus 856038
aggtcaggaagaaagcaa

SEQ ID NO: 727 - DNA, 18 bp, Vibrio parahaemolyticus
  Vibrio parahaemolyticus 856038
aggtccggaaggaagcag

SEQ ID NO: 728 - DNA, 28 bp, Vibrio parahaemolyticus
  Vibrio parahaemolyticus MAVP-E
gtgtcctgccgtgtaggcagctaagaaa

SEQ ID NO: 729 - DNA, 28 bp, Vibrio parahaemolyticus
  Vibrio parahaemolyticus MAVP-E
gtgtcctgccgcataggcagccaataat

SEQ ID NO: 730 - DNA, 28 bp, Vibrio parahaemolyticus
  Vibrio parahaemolyticus MAVP-E
gtgacctgccgtataggcagccaagaat

SEQ ID NO: 731 - DNA, 28 bp, Vibrio parahaemolyticus
  Vibrio parahaemolyticus MAVP-E
cctacctgctgaacaagcagttaataat

SEQ ID NO: 732 - DNA, 32 bp, Vibrio parahaemolyticus; identical to SEQ ID NO: 31
  Vibrio parahaemolyticus MAVP-E

SEQ ID NO: 733 - DNA, 32 bp, Vibrio parahaemolyticus; identical to SEQ ID NO: 32
  Vibrio parahaemolyticus MAVP-E

SEQ ID NO: 734 - DNA, 18 bp, Vibrio parahaemolyticus
  Vibrio parahaemolyticus MAVP-E
aggtcaggaagaaagcaa

SEQ ID NO: 735 - DNA, 18 bp, Vibrio parahaemolyticus
  Vibrio parahaemolyticus MAVP-E
aggtccggaaggaagcag

SEQ ID NO: 736 - DNA, 28 bp, Vibrio toranzoniae
  Vibrio toranzoniae Vb 10.8
gtgtcctgccgcataggcagctaagaat

SEQ ID NO: 737 - DNA, 28 bp, Vibrio toranzoniae
  Vibrio toranzoniae Vb 10.8
ccttcctgctgaacaagcagttagcaat

SEQ ID NO: 738 - DNA, 18 bp, Vibrio toranzoniae
  Vibrio toranzoniae Vb 10.8
aggccaggaagaaagcaa

SEQ ID NO: 739 - DNA, 18 bp, Vibrio toranzoniae
  Vibrio toranzoniae Vb 10.8
aggcctggaagggagcag

SEQ ID NO: 740 - DNA, 28 bp, Vibrio parahaemolyticus
  Vibrio parahaemolyticus 926501
gtgtcctgccgtgtaggcagctaagaaa

SEQ ID NO: 741 - DNA, 28 bp, Vibrio parahaemolyticus
  Vibrio parahaemolyticus 926501
gtgtcctgccgcataggcagccaataat

SEQ ID NO: 742 - DNA, 28 bp, Vibrio parahaemolyticus
  Vibrio parahaemolyticus 926501
gtgacctgccgtataggcagccaagaat

SEQ ID NO: 743 - DNA, 28 bp, Vibrio parahaemolyticus
  Vibrio parahaemolyticus 926501
cctacctgctgaacaagcagttaataat

SEQ ID NO: 744 - DNA, 32 bp, Vibrio parahaemolyticus; identical to SEQ ID NO: 31
  Vibrio parahaemolyticus 926501

SEQ ID NO: 745 - DNA, 32 bp, Vibrio parahaemolyticus; identical to SEQ ID NO: 32
  Vibrio parahaemolyticus 926501

SEQ ID NO: 746 - DNA, 18 bp, Vibrio parahaemolyticus
  Vibrio parahaemolyticus 926501
aggtcaggaagaaagcaa

SEQ ID NO: 747 - DNA, 18 bp, Vibrio parahaemolyticus
  Vibrio parahaemolyticus 926501
aggtccggaaggaagcag

SEQ ID NO: 748 - DNA, 28 bp, Shewanella sp.
  Shewanella sp. UCD-FRSSP16_17
gtgacctgccgaataggcagctgaaaaa

SEQ ID NO: 749 - DNA, 28 bp, Shewanella sp.
  Shewanella sp. UCD-FRSSP16_17
gtgacctgccgaataggcagctgaaaag

SEQ ID NO: 750 - DNA, 28 bp, Shewanella sp.
  Shewanella sp. UCD-FRSSP16_17
gatatctgccgaaaaggcagttaagcct

SEQ ID NO: 751 - DNA, 32 bp, Shewanella sp.
  Shewanella sp. UCD-FRSSP16_17
tagagtgccaaagcacgagaataaaacagaca

SEQ ID NO: 752 - DNA, 32 bp, Shewanella sp.
  Shewanella sp. UCD-FRSSP16_17
attagtttagtcggggcttccgagcttgatag

SEQ ID NO: 753 - DNA, 32 bp, Shewanella sp.
  Shewanella sp. UCD-FRSSP16_17
cgcgataattgtgacttacgagtcgactttga

SEQ ID NO: 754 - DNA, 32 bp, Shewanella sp.
  Shewanella sp. UCD-FRSSP16_17
cgtgaaaaccgcgactttagagtggactttga

SEQ ID NO: 755 - DNA, 28 bp, Vibrio parahaemolyticus
  Vibrio parahaemolyticus GCSL_R146
ggtatctgccgcataggcagtcaagaaa

SEQ ID NO: 756 - DNA, 28 bp, Vibrio parahaemolyticus
  Vibrio parahaemolyticus GCSL_R146
gtgatctgccgcataggcagctaagaat

SEQ ID NO: 757 - DNA, 28 bp, Vibrio parahaemolyticus
  Vibrio parahaemolyticus GCSL_R146
cctacctgctgaacaagcagtttttatt

SEQ ID NO: 758 - DNA, 32 bp, Vibrio parahaemolyticus; identical to SEQ ID NO: 82
  Vibrio parahaemolyticus GCSL_R146

SEQ ID NO: 759 - DNA, 18 bp, Vibrio parahaemolyticus
  Vibrio parahaemolyticus GCSL_R146
aggtctggaagaaaacaa

SEQ ID NO: 760 - DNA, 18 bp, Vibrio parahaemolyticus
  Vibrio parahaemolyticus GCSL_R146
aggtccggaaggaagcag

SEQ ID NO: 761 - DNA, 28 bp, Halomonas sp.
  Halomonas sp. Soap Lake #7
gtaaaccgccgaataggcagctgaaaaa

SEQ ID NO: 762 - DNA, 28 bp, Halomonas sp.
  Halomonas sp. Soap Lake #7
gtgaaccgccgaataggcagctgatatt

SEQ ID NO: 763 - DNA, 28 bp, Halomonas sp.
  Halomonas sp. Soap Lake #7
ggctaaaattgaggcggcagctgatgcc

SEQ ID NO: 764 - DNA, 28 bp, Halomonas sp.
  Halomonas sp. Soap Lake #7
ttgatacgccgcatagccacgcagcggc

SEQ ID NO: 765 - DNA, 32 bp, Halomonas sp.; identical to SEQ ID NO: 606
  Halomonas sp. Soap Lake #7

SEQ ID NO: 766 - DNA, 31 bp, Halomonas sp.; identical to SEQ ID NO: 607
  Halomonas sp. Soap Lake #7

SEQ ID NO: 767 - DNA, 32 bp, Halomonas sp.; identical to SEQ ID NO: 608
  Halomonas sp. Soap Lake #7

SEQ ID NO: 768 - DNA, 32 bp, Halomonas sp.; identical to SEQ ID NO: 609
  Halomonas sp. Soap Lake #7

SEQ ID NO: 769 - DNA, 28 bp, Vibrio parahaemolyticus
  Vibrio parahaemolyticus MAVP-Q
gtgtcctgccgtgtaggcagctaagaaa

SEQ ID NO: 770 - DNA, 28 bp, Vibrio parahaemolyticus
  Vibrio parahaemolyticus MAVP-Q
gtgtcctgccgcataggcagccaataat

SEQ ID NO: 771 - DNA, 28 bp, Vibrio parahaemolyticus
  Vibrio parahaemolyticus MAVP-Q
gtgacctgccgtataggcagccaagaat

SEQ ID NO: 772 - DNA, 28 bp, Vibrio parahaemolyticus
  Vibrio parahaemolyticus MAVP-Q
cctacctgctgaacaagcagttaataat

SEQ ID NO: 773 - DNA, 32 bp, Vibrio parahaemolyticus; identical to SEQ ID NO: 31
  Vibrio parahaemolyticus MAVP-Q

SEQ ID NO: 774 - DNA, 32 bp, Vibrio parahaemolyticus; identical to SEQ ID NO: 32
  Vibrio parahaemolyticus MAVP-Q

SEQ ID NO: 775 - DNA, 18 bp, Vibrio parahaemolyticus
  Vibrio parahaemolyticus MAVP-Q
aggtcaggaagaaagcaa

SEQ ID NO: 776 - DNA, 18 bp, Vibrio parahaemolyticus
  Vibrio parahaemolyticus MAVP-Q
aggtccggaaggaagcag

SEQ ID NO: 777 - DNA, 28 bp, Aeromonas salmonicida
  Aeromonas salmonicida S44
gtgaactgccgtataggcagccaagaaa

SEQ ID NO: 778 - DNA, 28 bp, Aeromonas salmonicida
  Aeromonas salmonicida S44
gtgaactgccgtataggcagccaagatt

SEQ ID NO: 779 - DNA, 28 bp, Aeromonas salmonicida
  Aeromonas salmonicida S44
attttctgccgtaaaggcagatattatt

SEQ ID NO: 780 - DNA, 32 bp, Aeromonas salmonicida
  Aeromonas salmonicida S44
cggaaggggagggcaccctgcttattgataat

SEQ ID NO: 781 - DNA, 32 bp, Aeromonas salmonicida
  Aeromonas salmonicida S44
aggactggaagaaatcatccaagttggggact

SEQ ID NO: 782 - DNA, 28 bp, Vibrio parahaemolyticus
  Vibrio parahaemolyticus G6928
gtgtcctgccgtgtaggcagctaagaaa

SEQ ID NO: 783 - DNA, 28 bp, Vibrio parahaemolyticus
  Vibrio parahaemolyticus G6928
gtgtcctgccgcataggcagccaataat

SEQ ID NO: 784 - DNA, 28 bp, Vibrio parahaemolyticus
  Vibrio parahaemolyticus G6928
gtgacctgccgtataggcagccaagaat

SEQ ID NO: 785 - DNA, 28 bp, Vibrio parahaemolyticus
  Vibrio parahaemolyticus G6928
cctacctgctgaacaagcagttaataat

SEQ ID NO: 786 - DNA, 32 bp, Vibrio parahaemolyticus; identical to SEQ ID NO: 31
  Vibrio parahaemolyticus G6928

SEQ ID NO: 787 - DNA, 32 bp, Vibrio parahaemolyticus; identical to SEQ ID NO: 32
  Vibrio parahaemolyticus G6928

SEQ ID NO: 788 - DNA, 18 bp, Vibrio parahaemolyticus
  Vibrio parahaemolyticus G6928
aggtcaggaagaaagcaa

SEQ ID NO: 789 - DNA, 18 bp, Vibrio parahaemolyticus
  Vibrio parahaemolyticus G6928
aggtccggaaggaagcag

SEQ ID NO: 790 - DNA, 28 bp, Vibrio parahaemolyticus
  Vibrio parahaemolyticus MAVP-R
gtgtcctgccgtgtaggcagctaagaaa

SEQ ID NO: 791 - DNA, 28 bp, Vibrio parahaemolyticus
  Vibrio parahaemolyticus MAVP-R
gtgtcctgccgcataggcagccaataat

SEQ ID NO: 792 - DNA, 28 bp, Vibrio parahaemolyticus
  Vibrio parahaemolyticus MAVP-R
gtgacctgccgtataggcagccaagaat

SEQ ID NO: 793 - DNA, 28 bp, Vibrio parahaemolyticus
  Vibrio parahaemolyticus MAVP-R
cctacctgctgaacaagcagttaataat

SEQ ID NO: 794 - DNA, 32 bp, Vibrio parahaemolyticus; identical to SEQ ID NO: 31
  Vibrio parahaemolyticus MAVP-R

SEQ ID NO: 795 - DNA, 32 bp, Vibrio parahaemolyticus; identical to SEQ ID NO: 32
  Vibrio parahaemolyticus MAVP-R

SEQ ID NO: 796 - DNA, 18 bp, Vibrio parahaemolyticus
  Vibrio parahaemolyticus MAVP-R
aggtcaggaagaaagcaa

SEQ ID NO: 797 - DNA, 18 bp, Vibrio parahaemolyticus
  Vibrio parahaemolyticus MAVP-R
aggtccggaaggaagcag

SEQ ID NO: 798 - DNA, 28 bp, Vibrio cholerae
  Vibrio cholerae OYP8C06
ttgccctgccgcataggcagccaagaaa

SEQ ID NO: 799 - DNA, 28 bp, Vibrio cholerae
  Vibrio cholerae OYP8C06
gtgacctgccgtataggtagccaaaaat

SEQ ID NO: 800 - DNA, 28 bp, Vibrio cholerae
  Vibrio cholerae OYP8C06
cctacctgctgaacaagcagttaataat

SEQ ID NO: 801 - DNA, 32 bp, Vibrio cholerae; identical to SEQ ID NO: 242
  Vibrio cholerae OYP8C06

SEQ ID NO: 802 - DNA, 18 bp, Vibrio cholerae
  Vibrio cholerae OYP8C06
aggtcaggaagaaagcaa

SEQ ID NO: 803 - DNA, 18 bp, Vibrio cholerae
  Vibrio cholerae OYP8C06
agatccggaaggaagcag

SEQ ID NO: 804 - DNA, 28 bp, Vibrio cholerae
  Vibrio cholerae OYP8F12
ttgccctgccgcataggcagccaagaaa

SEQ ID NO: 805 - DNA, 28 bp, Vibrio cholerae
  Vibrio cholerae OYP8F12
gtgacctgccgtataggtagccaaaaat

SEQ ID NO: 806 - DNA, 28 bp, Vibrio cholerae
  Vibrio cholerae OYP8F12
cctacctgctgaacaagcagttaataat

SEQ ID NO: 807 - DNA, 32 bp, Vibrio cholerae; identical to SEQ ID NO: 242
  Vibrio cholerae OYP8F12

SEQ ID NO: 808 - DNA, 18 bp, Vibrio cholerae
  Vibrio cholerae OYP8F12
aggtcaggaagaaagcaa

SEQ ID NO: 809 - DNA, 18 bp, Vibrio cholerae
  Vibrio cholerae OYP8F12
agatccggaaggaagcag

SEQ ID NO: 810 - DNA, 28 bp, Vibrio sp.
  Vibrio sp. dhg
gtgatctgccgagtaggcagctaagaaa

SEQ ID NO: 811 - DNA, 28 bp, Vibrio sp.
  Vibrio sp. dhg
gtgacctgccgagtaggcagctaagaaa

SEQ ID NO: 812 - DNA, 28 bp, Vibrio sp.
  Vibrio sp. dhg
aaaccctgccgaataggtagtttgaatt

SEQ ID NO: 813 - DNA, 32 bp, Vibrio sp.
  Vibrio sp. dhg
aatcacaacttttggctaacacacagcatcgg

SEQ ID NO: 814 - DNA, 22 bp, Vibrio sp.
  Vibrio sp. dhg
atgttaaaaaaatactcaggta

SEQ ID NO: 815 - DNA, 22 bp, Vibrio sp.
  Vibrio sp. dhg
atgtttaagaaatactccggca

SEQ ID NO: 816 - DNA, 28 bp, Vibrio cholerae
  Vibrio cholerae N2808
gtgttctgccgaataggcagccaagaaa

SEQ ID NO: 817 - DNA, 28 bp, Vibrio cholerae
  Vibrio cholerae N2808
gtgttctgccgaataggcagctaagaat

SEQ ID NO: 818 - DNA, 28 bp, Vibrio cholerae
  Vibrio cholerae N2808
cctacctgctgaacaagcagttaatatt

SEQ ID NO: 819 - DNA, 32 bp, Vibrio cholerae
  Vibrio cholerae N2808
caatcgcagcagagttctcagaaagaccgcta

SEQ ID NO: 820 - DNA, 32 bp, Vibrio cholerae
  Vibrio cholerae N2808
gccatagggatagctagtgcttcttctggtgt

SEQ ID NO: 821 - DNA, 18 bp, Vibrio cholerae
  Vibrio cholerae N2808
agatcaggaagcaagcaa

SEQ ID NO: 822 - DNA, 18 bp, Vibrio cholerae
  Vibrio cholerae N2808
agatccggaaggaagcag

SEQ ID NO: 823 - DNA, 28 bp, Vibrio parahaemolyticus
  Vibrio parahaemolyticus CFSAN018753
gtgtcctgccgcataggcagctaagaat

SEQ ID NO: 824 - DNA, 28 bp, Vibrio parahaemolyticus
  Vibrio parahaemolyticus CFSAN018753
cccacctgctgaacaagcagttaagaat

SEQ ID NO: 825 - DNA, 32 bp, Vibrio parahaemolyticus
  Vibrio parahaemolyticus CFSAN018753
tggcagagcgggattagttatcaagagattga

SEQ ID NO: 826 - DNA, 18 bp, Vibrio parahaemolyticus
  Vibrio parahaemolyticus CFSAN018753
aggccaggaagaaagcaa

SEQ ID NO: 827 - DNA, 18 bp, Vibrio parahaemolyticus
  Vibrio parahaemolyticus CFSAN018753
aggtccggaaggaagcag

SEQ ID NO: 828 - DNA, 28 bp, Vibrio parahaemolyticus
  Vibrio parahaemolyticus CDC_K5073
ggtatctgccgcataggcagtcaagaaa

SEQ ID NO: 829 - DNA, 28 bp, Vibrio parahaemolyticus
  Vibrio parahaemolyticus CDC_K5073
gtgatctgccgcataggcagctaagaat

SEQ ID NO: 830 - DNA, 28 bp, Vibrio parahaemolyticus
  Vibrio parahaemolyticus CDC_K5073
cctacctgctgaacaagcagtttttatt

SEQ ID NO: 831 - DNA, 32 bp, Vibrio parahaemolyticus; identical to SEQ ID NO: 82
  Vibrio parahaemolyticus CDC_K5073

SEQ ID NO: 832 - DNA, 18 bp, Vibrio parahaemolyticus
  Vibrio parahaemolyticus CDC_K5073
aggtctggaagaaaacaa

SEQ ID NO: 833 - DNA, 18 bp, Vibrio parahaemolyticus
  Vibrio parahaemolyticus CDC_K5073
aggtccggaaggaagcag

SEQ ID NO: 834 - DNA, 28 bp, Pseudoalteromonas issachenkonii
  Pseudoalteromonas issachenkonii KCTC 12958
gtgaactgccgagtaggcagctgaaaat

SEQ ID NO: 835 - DNA, 28 bp, Pseudoalteromonas issachenkonii
  Pseudoalteromonas issachenkonii KCTC 12958
atcttctgccgaataggcagctgaaatt

SEQ ID NO: 836 - DNA, 28 bp, Pseudoalteromonas issachenkonii
  Pseudoalteromonas issachenkonii KCTC 12958
tataactgccgaaaaggcagaggctaaa

SEQ ID NO: 837 - DNA, 32 bp, Pseudoalteromonas issachenkonii
  Pseudoalteromonas issachenkonii KCTC 12958
ttagaaaatagtcgagtagttcctacacgtgt

SEQ ID NO: 838 - DNA, 34 bp, Pseudoalteromonas issachenkonii
  Pseudoalteromonas issachenkonii KCTC 12958
aggccaggaagtaaacaaccacaacttgtgactt

SEQ ID NO: 839 - DNA, 34 bp, Pseudoalteromonas issachenkonii
  Pseudoalteromonas issachenkonii KCTC 12958
aggcccggaagggagcagccacagtttgtgacgt

SEQ ID NO: 840 - DNA, 28 bp, Vibrio fluvialis
  Vibrio fluvialis NCTC11327
gtgttccgccgagtaggcggctaagaat

SEQ ID NO: 841 - DNA, 28 bp, Vibrio fluvialis
  Vibrio fluvialis NCTC11327
gtgttccgccgagtaggcggccaagaat

SEQ ID NO: 842 - DNA, 32 bp, Vibrio fluvialis; identical to SEQ ID NO: 253
  Vibrio fluvialis NCTC11327

SEQ ID NO: 843 - DNA, 32 bp, Vibrio fluvialis; identical to SEQ ID NO: 254
  Vibrio fluvialis NCTC11327

SEQ ID NO: 844 - DNA, 28 bp, Vibrio parahaemolyticus
  Vibrio parahaemolyticus VP2007-095
gtgtcctgccgtgtaggcagctaagaaa

SEQ ID NO: 845 - DNA, 28 bp, Vibrio parahaemolyticus
  Vibrio parahaemolyticus VP2007-095
gtgtcctgccgcataggcagccaataat

SEQ ID NO: 846 - DNA, 28 bp, Vibrio parahaemolyticus
  Vibrio parahaemolyticus VP2007-095
gtgacctgccgtataggcagccaagaat

SEQ ID NO: 847 - DNA, 28 bp, Vibrio parahaemolyticus
  Vibrio parahaemolyticus VP2007-095
cctacctgctgaacaagcagttaataat

SEQ ID NO: 848 - DNA, 32 bp, Vibrio parahaemolyticus; identical to SEQ ID NO: 31
  Vibrio parahaemolyticus VP2007-095

SEQ ID NO: 849 - DNA, 32 bp, Vibrio parahaemolyticus; identical to SEQ ID NO: 32
  Vibrio parahaemolyticus VP2007-095

SEQ ID NO: 850 - DNA, 18 bp, Vibrio parahaemolyticus
  Vibrio parahaemolyticus VP2007-095
aggtcaggaagaaagcaa

SEQ ID NO: 851 - DNA, 18 bp, Vibrio parahaemolyticus
  Vibrio parahaemolyticus VP2007-095
aggtccggaaggaagcag

SEQ ID NO: 852 - DNA, 28 bp, Aliivibrio fischeri
  Aliivibrio fischeri ZF-211
gtaacctgccgaataggcagccaagaat

SEQ ID NO: 853 - DNA, 32 bp, Aliivibrio fischeri
  Aliivibrio fischeri ZF-211
aattgaagtacagtcacaagcagttaatcttt

SEQ ID NO: 854 - DNA, 28 bp, Vibrio cholerae
  Vibrio cholerae YB4H02
ttgccctgccgcataggcagccaagaaa

SEQ ID NO: 855 - DNA, 28 bp, Vibrio cholerae
  Vibrio cholerae YB4H02
gtgacctgccgtataggtagccaaaaat

SEQ ID NO: 856 - DNA, 28 bp, Vibrio cholerae
  Vibrio cholerae YB4H02
cctacctgctgaacaagcagttaataat

SEQ ID NO: 857 - DNA, 32 bp, Vibrio cholerae; identical to SEQ ID NO: 242
  Vibrio cholerae YB4H02

SEQ ID NO: 858 - DNA, 18 bp, Vibrio cholerae
  Vibrio cholerae YB4H02
aggtcaggaagaaagcaa

SEQ ID NO: 859 - DNA, 18 bp, Vibrio cholerae
  Vibrio cholerae YB4H02
agatccggaaggaagcag

SEQ ID NO: 860 - DNA, 28 bp, Vibrio cholerae
  Vibrio cholerae OYP2C05
gtcacctgtcgcatagacagccaataat

SEQ ID NO: 861 - DNA, 28 bp, Vibrio cholerae
  Vibrio cholerae OYP2C05
gtgacctgttacatagacagccaagaat

SEQ ID NO: 862 - DNA, 28 bp, Vibrio cholerae
  Vibrio cholerae OYP2C05
cctacctgttgaacaagcagttaataat

SEQ ID NO: 863 - DNA, 32 bp, Vibrio cholerae
  Vibrio cholerae OYP2C05
atatcgacttcatgtgggccttccatcatttc

SEQ ID NO: 864 - DNA, 32 bp, Vibrio cholerae
  Vibrio cholerae OYP2C05
attcaatccagttcgctcgatattcgccttgt

SEQ ID NO: 865 - DNA, 18 bp, Vibrio cholerae
  Vibrio cholerae OYP2C05
aggtcaggaagaaagcaa

SEQ ID NO: 866 - DNA, 18 bp, Vibrio cholerae
  Vibrio cholerae OYP2C05
agatccggaaggaagcag

SEQ ID NO: 867 - DNA, 28 bp, Vibrio cholerae
  Vibrio cholerae A110926W4
gtgttctgctgaataggcagccaagaaa

SEQ ID NO: 868 - DNA, 28 bp, Vibrio cholerae
  Vibrio cholerae A110926W4
gtgttctgccgaataggcagccaagaaa

SEQ ID NO: 869 - DNA, 28 bp, Vibrio cholerae
  Vibrio cholerae A110926W4
gtgttctgccgaataggcagccaagaat

SEQ ID NO: 870 - DNA, 28 bp, Vibrio cholerae
  Vibrio cholerae A110926W4
cctacctgctgaacaagcagttaataat

SEQ ID NO: 871 - DNA, 32 bp, Vibrio cholerae
  Vibrio cholerae A110926W4
cgcacgaaaaatcttatcgtgcacgttgttgt

SEQ ID NO: 872 - DNA, 32 bp, Vibrio cholerae; identical to SEQ ID NO: 409
  Vibrio cholerae A110926W4

SEQ ID NO: 873 - DNA, 32 bp, Vibrio cholerae
  Vibrio cholerae A110926W4
atgaaagccccacggacagccaagcggctccg

SEQ ID NO: 874 - DNA, 18 bp, Vibrio cholerae
  Vibrio cholerae A110926W4
aggtcaggaagaaagcaa

SEQ ID NO: 875 - DNA, 18 bp, Vibrio cholerae
  Vibrio cholerae A110926W4
agatccggaaggaagcag

SEQ ID NO: 876 - DNA, 28 bp, Vibrio vulnificus
  Vibrio vulnificus BAA87
gtgacctgccgcataggcagccaagaaa

SEQ ID NO: 877 - DNA, 28 bp, Vibrio vulnificus
  Vibrio vulnificus BAA87
gtgacctgccgcataggcagccaagaat

SEQ ID NO: 878 - DNA, 28 bp, Vibrio vulnificus
  Vibrio vulnificus BAA87
cctacctgctgaacaagcagttaataat

SEQ ID NO: 879 - DNA, 31 bp, Vibrio vulnificus
  Vibrio vulnificus BAA87
aaacaatgcagttatattccttatgatcaga

SEQ ID NO: 880 - DNA, 18 bp, Vibrio vulnificus
  Vibrio vulnificus BAA87
aggttaggaagaaagcaa

SEQ ID NO: 881 - DNA, 18 bp, Vibrio vulnificus
  Vibrio vulnificus BAA87
aggtccggaaggaagcag

SEQ ID NO: 882 - DNA, 28 bp, Vibrio splendidus
  Vibrio splendidus ZS_82
gtgtcctgccgcataggcagctaagaaa

SEQ ID NO: 883 - DNA, 28 bp, Vibrio splendidus
  Vibrio splendidus ZS_82
atgtcctgccgcataggcagctaagaat

SEQ ID NO: 884 - DNA, 28 bp, Vibrio splendidus
  Vibrio splendidus ZS_82
ccttcctgctgaacaagcagtagataat

SEQ ID NO: 885 - DNA, 34 bp, Vibrio splendidus; identical to SEQ ID NO: 167
  Vibrio splendidus ZS_82

SEQ ID NO: 886 - DNA, 18 bp, Vibrio splendidus
  Vibrio splendidus ZS_82
aggccaggaagaaagcaa

SEQ ID NO: 887 - DNA, 18 bp, Vibrio splendidus
  Vibrio splendidus ZS_82
aggcctggaagggagcag

SEQ ID NO: 888 - DNA, 28 bp, Photobacterium sanguinicancri
  Photobacterium sanguinicancri ME15
gtgacctgccgaataggcagctgataaa

SEQ ID NO: 889 - DNA, 28 bp, Photobacterium sanguinicancri
  Photobacterium sanguinicancri ME15
gtgacctgccgaataggcagttgagata

SEQ ID NO: 890 - DNA, 28 bp, Photobacterium sanguinicancri
  Photobacterium sanguinicancri ME15
aagacctgccgaagaggcagtgttgcta

SEQ ID NO: 891 - DNA, 32 bp, Photobacterium sanguinicancri
  Photobacterium sanguinicancri ME15
atcgtaaaaaacttgagcaggaacattagaag

SEQ ID NO: 892 - DNA, 34 bp, Photobacterium sanguinicancri
  Photobacterium sanguinicancri ME15
aggccaagaagtaagcaaccacaataagcaaaat

SEQ ID NO: 893 - DNA, 34 bp, Photobacterium sanguinicancri
  Photobacterium sanguinicancri ME15
aggcccggaagggagcagccacaatgagcgacgt

SEQ ID NO: 894 - DNA, 28 bp, Vibrio cholerae
  Vibrio cholerae Drakes2013
gtgttctgccgaataggcagccaagaaa

SEQ ID NO: 895 - DNA, 28 bp, Vibrio cholerae
  Vibrio cholerae Drakes2013
gtgttctgccgaataggcagccaagaat

SEQ ID NO: 896 - DNA, 28 bp, Vibrio cholerae
  Vibrio cholerae Drakes2013
cctacctgctgaacaagcagttaataaa

SEQ ID NO: 897 - DNA, 32 bp, Vibrio cholerae
  Vibrio cholerae Drakes2013
aaggacagttttaatgatgaattgaccgatgg

SEQ ID NO: 898 - DNA, 32 bp, Vibrio cholerae
  Vibrio cholerae Drakes2013
tcatatcgatgagtatcgctttcaactttttt

SEQ ID NO: 899 - DNA, 18 bp, Vibrio cholerae
  Vibrio cholerae Drakes2013
aggtcaggaagaaagcaa

SEQ ID NO: 900 - DNA, 18 bp, Vibrio cholerae
  Vibrio cholerae Drakes2013
agatccggaaggaagcag

SEQ ID NO: 901 - DNA, 28 bp, Shewanella baltica
  Shewanella baltica OS223
gtgacctgccgaataggcagctgaaaat

SEQ ID NO: 902 - DNA, 28 bp, Shewanella baltica
  Shewanella baltica OS223
gtaaactgccggataggcagtaaaagcc

SEQ ID NO: 903 - DNA, 32 bp, Shewanella baltica
  Shewanella baltica OS223
cccactgaaaagcagtacgactcgctctgtgc

SEQ ID NO: 904 - DNA, 33 bp, Shewanella baltica
  Shewanella baltica OS223
aaaaacaatcgtttcgacgtttatgttaataca

SEQ ID NO: 905 - DNA, 33 bp, Shewanella baltica
  Shewanella baltica OS223
aagaaaaaccgtttcgatgtctacgtaaaagcc

SEQ ID NO: 906 - DNA, 28 bp, Vibrio sp.
  Vibrio sp. 16
gtgacctgccgcataggcagctaagaat

SEQ ID NO: 907 - DNA, 28 bp, Vibrio sp.
  Vibrio sp. 16
cttgcctgctgagcaagcagttgataat

SEQ ID NO: 908 - DNA, 32 bp, Vibrio sp.
  Vibrio sp. 16
atctcttcacaatcaactgggttcgccttggc

SEQ ID NO: 909 - DNA, 32 bp, Vibrio sp.
  Vibrio sp. 16
gcacgcaaaagccgaatatgagcaatgcgttg

SEQ ID NO: 910 - DNA, 18 bp, Vibrio sp.
  Vibrio sp. 16
aggtcaggaagaaagcaa

SEQ ID NO: 911 - DNA, 18 bp, Vibrio sp.
  Vibrio sp. 16
aggtccggaaggaagcag

SEQ ID NO: 912 - DNA, 28 bp, Vibrio sp.
  Vibrio sp. HI00D65
gtgacctgccgcataggcagctaagaaa

SEQ ID NO: 913 - DNA, 28 bp, Vibrio sp.
  Vibrio sp. HI00D65
gtgacctgccgcataggcagctaagaat

SEQ ID NO: 914 - DNA, 28 bp, Vibrio sp.
  Vibrio sp. HI00D65
ccttcctgctgaacaagcagttaataat

SEQ ID NO: 915 - DNA, 32 bp, Vibrio sp.
  Vibrio sp. HI00D65
tgttttaattcttcaagtgttgtgatccgttg

SEQ ID NO: 916 - DNA, 18 bp, Vibrio sp.
  Vibrio sp. HI00D65
aggccaggaagaaagcaa

SEQ ID NO: 917 - DNA, 18 bp, Vibrio sp.
  Vibrio sp. HI00D65
aggtccggaaggaagcag

SEQ ID NO: 918 - DNA, 28 bp, Vibrio parahaemolyticus
  Vibrio parahaemolyticus CFSAN018752
gtgtcctgccgcataggcagctaagaat

SEQ ID NO: 919 - DNA, 28 bp, Vibrio parahaemolyticus
  Vibrio parahaemolyticus CFSAN018752
cccacctgctgaacaagcagttaagaat

SEQ ID NO: 920 - DNA, 32 bp, Vibrio parahaemolyticus; identical to SEQ ID NO: 825
  Vibrio parahaemolyticus CFSAN018752

SEQ ID NO: 921 - DNA, 18 bp, Vibrio parahaemolyticus
  Vibrio parahaemolyticus CFSAN018752
aggccaggaagaaagcaa

SEQ ID NO: 922 - DNA, 18 bp, Vibrio parahaemolyticus
  Vibrio parahaemolyticus CFSAN018752
aggtccggaaggaagcag

SEQ ID NO: 923 - DNA, 28 bp, Vibrio breoganii
  Vibrio breoganii 10N.286.49.E9
gtgtcctgccgcataggcagctaagaaa

SEQ ID NO: 924 - DNA, 28 bp, Vibrio breoganii
  Vibrio breoganii 10N.286.49.E9
gtgtcctgccgcataggcagctaagaat

SEQ ID NO: 925 - DNA, 28 bp, Vibrio breoganii
  Vibrio breoganii 10N.286.49.E9
ccatcctgctgaacaagcagttaataat

SEQ ID NO: 926 - DNA, 32 bp, Vibrio breoganii; identical to SEQ ID NO: 592
  Vibrio breoganii 10N.286.49.E9

SEQ ID NO: 927 - DNA, 32 bp, Vibrio breoganii; identical to SEQ ID NO: 593
  Vibrio breoganii 10N.286.49.E9

SEQ ID NO: 928 - DNA, 18 bp, Vibrio breoganii
  Vibrio breoganii 10N.286.49.E9
aggtctggaagaaagcaa

SEQ ID NO: 929 - DNA, 18 bp, Vibrio breoganii
  Vibrio breoganii 10N.286.49.E9
agatccggaaggaagcag

SEQ ID NO: 930 - DNA, 28 bp, Vibrio lentus
  Vibrio lentus 10N.286.51.C2
gtgtcctgccgcataggcagctaagaaa

SEQ ID NO: 931 - DNA, 28 bp, Vibrio lentus
  Vibrio lentus 10N.286.51.C2
gtgtcctgccgcataggcagctaagaat

SEQ ID NO: 932 - DNA, 28 bp, Vibrio lentus
  Vibrio lentus 10N.286.51.C2
ccttcctgctgaacaagcagttaataat

SEQ ID NO: 933 - DNA, 32 bp, Vibrio lentus; identical to SEQ ID NO: 161
  Vibrio lentus 10N.286.51.C2

SEQ ID NO: 934 - DNA, 18 bp, Vibrio lentus
  Vibrio lentus 10N.286.51.C2
aggccaggaagaaagcaa

SEQ ID NO: 935 - DNA, 18 bp, Vibrio lentus
  Vibrio lentus 10N.286.51.C2
aggcctggaagggagcag

SEQ ID NO: 936 - DNA, 28 bp, Vibrio sp.
  Vibrio sp. 10N.261.46.E8
gtgacctgccgcataggcagctaagaaa

SEQ ID NO: 937 - DNA, 28 bp, Vibrio sp.
  Vibrio sp. 10N.261.46.E8
gtgtcctgccgcataggcagttaagaat

SEQ ID NO: 938 - DNA, 28 bp, Vibrio sp.
  Vibrio sp. 10N.261.46.E8
ccatcctgctgaacaagcagttaataat

SEQ ID NO: 939 - DNA, 32 bp, Vibrio sp.; identical to SEQ ID NO: 275
  Vibrio sp. 10N.261.46.E8

SEQ ID NO: 940 - DNA, 32 bp, Vibrio sp.; identical to SEQ ID NO: 276
  Vibrio sp. 10N.261.46.E8

SEQ ID NO: 941 - DNA, 32 bp, Vibrio sp.; identical to SEQ ID NO: 277
  Vibrio sp. 10N.261.46.E8

SEQ ID NO: 942 - DNA, 18 bp, Vibrio sp.
  Vibrio sp. 10N.261.46.E8
aggccaggaagaaagcaa

SEQ ID NO: 943 - DNA, 32 bp, Vibrio sp.; identical to SEQ ID NO: 279
  Vibrio sp. 10N.261.46.E8

SEQ ID NO: 944 - DNA, 28 bp, Vibrio crassostreae
  Vibrio crassostreae 31_O_69
gtgacctgccgcataggcagctaagaat

SEQ ID NO: 945 - DNA, 28 bp, Vibrio crassostreae
  Vibrio crassostreae 31_O_69
ccttcctgctgaacaagcagttaaaatc

SEQ ID NO: 946 - DNA, 32 bp, Vibrio crassostreae; identical to SEQ ID NO: 395
  Vibrio crassostreae 31_O_69

SEQ ID NO: 947 - DNA, 18 bp, Vibrio crassostreae
  Vibrio crassostreae 31_O_69
aggccaggaagaaagcaa

SEQ ID NO: 948 - DNA, 18 bp, Vibrio crassostreae
  Vibrio crassostreae 31_O_69
aggcctggaagggagcag

SEQ ID NO: 949 - DNA, 28 bp, Pseudoalteromonas sp.
  Pseudoalteromonas sp. S1688
gtgacctgccgtataggcagctgaagat

SEQ ID NO: 950 - DNA, 28 bp, Pseudoalteromonas sp.
  Pseudoalteromonas sp. S1688
gttacctgccgtataggcagctgaagat

SEQ ID NO: 951 - DNA, 28 bp, Pseudoalteromonas sp.
  Pseudoalteromonas sp. S1688
taattctgccgaaaaggcagtgagtaga

SEQ ID NO: 952 - DNA, 32 bp, Pseudoalteromonas sp.
  Pseudoalteromonas sp. S1688
caactaaaaacacggttgatgtatggaagcgc

SEQ ID NO: 953 - DNA, 32 bp, Pseudoalteromonas sp.
  Pseudoalteromonas sp. S1688
tcttttaagcgcttgagtgcaacctctttcaa

SEQ ID NO: 954 - DNA, 31 bp, Pseudoalteromonas sp.; identical to SEQ ID NO: 315
  Pseudoalteromonas sp. S1688

SEQ ID NO: 955 - DNA, 31 bp, Pseudoalteromonas sp.
  Pseudoalteromonas sp. S1688
aaaaagaaccgctttgatgtatatgtaaaag

SEQ ID NO: 956 - DNA, 28 bp, Vibrio parahaemolyticus
  Vibrio parahaemolyticus CFSAN007439
ggtatctgccgcataggcagtcaagaaa

SEQ ID NO: 957 - DNA, 28 bp, Vibrio parahaemolyticus
  Vibrio parahaemolyticus CFSAN007439
gtgatctgccgcataggcagctaagaat

SEQ ID NO: 958 - DNA, 28 bp, Vibrio parahaemolyticus
  Vibrio parahaemolyticus CFSAN007439
cctacctgctgaacaagcagtttttatt

SEQ ID NO: 959 - DNA, 32 bp, Vibrio parahaemolyticus; identical to SEQ ID NO: 82
  Vibrio parahaemolyticus CFSAN007439

SEQ ID NO: 960 - DNA, 18 bp, Vibrio parahaemolyticus
  Vibrio parahaemolyticus CFSAN007439
aggtctggaagaaaacaa

SEQ ID NO: 961 - DNA, 18 bp, Vibrio parahaemolyticus
  Vibrio parahaemolyticus CFSAN007439
aggtccggaaggaagcag

SEQ ID NO: 962 - DNA, 28 bp, Vibrio parahaemolyticus
  Vibrio parahaemolyticus CFSAN007432
gtgtcctgccgtgtaggcagctaagaaa

SEQ ID NO: 963 - DNA, 28 bp, Vibrio parahaemolyticus
  Vibrio parahaemolyticus CFSAN007432
gtgtcctgccgcataggcagccaataat

SEQ ID NO: 964 - DNA, 28 bp, Vibrio parahaemolyticus
  Vibrio parahaemolyticus CFSAN007432
gtgacctgccgtataggcagccaagaat

SEQ ID NO: 965 - DNA, 28 bp, Vibrio parahaemolyticus
  Vibrio parahaemolyticus CFSAN007432
cctacctgctgaacaagcagttaataat

SEQ ID NO: 966 - DNA, 32 bp, Vibrio parahaemolyticus; identical to SEQ ID NO: 31
  Vibrio parahaemolyticus CFSAN007432

SEQ ID NO: 967 - DNA, 32 bp, Vibrio parahaemolyticus; identical to SEQ ID NO: 32
  Vibrio parahaemolyticus CFSAN007432

SEQ ID NO: 968 - DNA, 18 bp, Vibrio parahaemolyticus
  Vibrio parahaemolyticus CFSAN007432
aggtcaggaagaaagcaa

SEQ ID NO: 969 - DNA, 18 bp, Vibrio parahaemolyticus
  Vibrio parahaemolyticus CFSAN007432
aggtccggaaggaagcag

SEQ ID NO: 970 - DNA, 28 bp, Vibrio parahaemolyticus
  Vibrio parahaemolyticus CFSAN007429
gtgtcctgccgtgtaggcagctaagaaa

SEQ ID NO: 971 - DNA, 28 bp, Vibrio parahaemolyticus
  Vibrio parahaemolyticus CFSAN007429
gtgtcctgccgcataggcagccaataat

SEQ ID NO: 972 - DNA, 28 bp, Vibrio parahaemolyticus
  Vibrio parahaemolyticus CFSAN007429
gtgacctgccgtataggcagccaagaat

SEQ ID NO: 973 - DNA, 28 bp, Vibrio parahaemolyticus
  Vibrio parahaemolyticus CFSAN007429
cctacctgctgaacaagcagttaataat

SEQ ID NO: 974 - DNA, 32 bp, Vibrio parahaemolyticus; identical to SEQ ID NO: 31
  Vibrio parahaemolyticus CFSAN007429

SEQ ID NO: 975 - DNA, 32 bp, Vibrio parahaemolyticus; identical to SEQ ID NO: 32
  Vibrio parahaemolyticus CFSAN007429

SEQ ID NO: 976 - DNA, 18 bp, Vibrio parahaemolyticus
  Vibrio parahaemolyticus CFSAN007429
aggtcaggaagaaagcaa

SEQ ID NO: 977 - DNA, 18 bp, Vibrio parahaemolyticus
  Vibrio parahaemolyticus CFSAN007429
aggtccggaaggaagcag

SEQ ID NO: 978 - DNA, 28 bp, Vibrio cidicii
  Vibrio cidicii 2423-01
gtgtcctgccgtgtaggcagctaagaaa

SEQ ID NO: 979 - DNA, 28 bp, Vibrio cidicii
  Vibrio cidicii 2423-01
gtgtcctgccgcataggcagccaataat

SEQ ID NO: 980 - DNA, 28 bp, Vibrio cidicii
  Vibrio cidicii 2423-01
gtgacctgccgcataggcagccaagaat

SEQ ID NO: 981 - DNA, 28 bp, Vibrio cidicii
  Vibrio cidicii 2423-01
cctacctgttgaacaagcagttaataat

SEQ ID NO: 982 - DNA, 32 bp, Vibrio cidicii; identical to SEQ ID NO: 451
  Vibrio cidicii 2423-01

SEQ ID NO: 983 - DNA, 32 bp, Vibrio cidicii; identical to SEQ ID NO: 452
  Vibrio cidicii 2423-01

SEQ ID NO: 984 - DNA, 32 bp, Vibrio cidicii; identical to SEQ ID NO: 32
  Vibrio cidicii 2423-01

SEQ ID NO: 985 - DNA, 18 bp, Vibrio cidicii
  Vibrio cidicii 2423-01
aggtcaggaagaaagcaa

SEQ ID NO: 986 - DNA, 18 bp, Vibrio cidicii
  Vibrio cidicii 2423-01
aggtccggaaggaagcag

SEQ ID NO: 987 - DNA, 28 bp, Pseudoalteromonas luteoviolacea
  Pseudoalteromonas luteoviolacea NCIMB 1942
gtgttctgccgcataggcagctggaaat

SEQ ID NO: 988 - DNA, 28 bp, Pseudoalteromonas luteoviolacea
  Pseudoalteromonas luteoviolacea NCIMB 1942
gtgacctgccgcataggcagctgaaatt

SEQ ID NO: 989 - DNA, 28 bp, Pseudoalteromonas luteoviolacea
  Pseudoalteromonas luteoviolacea NCIMB 1942
taaaactgccgaaaaggcagaggccaat

SEQ ID NO: 990 - DNA, 32 bp, Pseudoalteromonas luteoviolacea
  Pseudoalteromonas luteoviolacea NCIMB 1942
ttgctttgaatatgacgcttggagaagctgcg

SEQ ID NO: 991 - DNA, 32 bp, Pseudoalteromonas luteoviolacea
  Pseudoalteromonas luteoviolacea NCIMB 1942
caacccagtagcgaaagaccccataccaaccg

SEQ ID NO: 992 - DNA, 32 bp, Pseudoalteromonas luteoviolacea
  Pseudoalteromonas luteoviolacea NCIMB 1942
gaaataaagtatcagcgccattgtctttgctc

SEQ ID NO: 993 - DNA, 32 bp, Pseudoalteromonas luteoviolacea
  Pseudoalteromonas luteoviolacea NCIMB 1942
tgagtagtcgaaaagcgataagattgtttttt

SEQ ID NO: 994 - DNA, 33 bp, Pseudoalteromonas luteoviolacea
  Pseudoalteromonas luteoviolacea NCIMB 1942
aggcctggaagtaaacaactacatcgtatgaca

SEQ ID NO: 995 - DNA, 33 bp, Pseudoalteromonas luteoviolacea; identical to SEQ ID NO: 76
  Pseudoalteromonas luteoviolacea NCIMB 1942

SEQ ID NO: 996 - DNA, 28 bp, Aliivibrio fischeri
  Aliivibrio fischeri 5F33
gtaatctgccgaataggcagccaagaat

SEQ ID NO: 997 - DNA, 28 bp, Aliivibrio fischeri
  Aliivibrio fischeri 5F33
gtaacctgccgaataggcagccaagaat

SEQ ID NO: 998 - DNA, 32 bp, Aliivibrio fischeri
  Aliivibrio fischeri 5F33
tatgatgattcatgttgaagagagtaatacat

SEQ ID NO: 999 - DNA, 28 bp, Vibrio parahaemolyticus
  Vibrio parahaemolyticus GCSL_R145
ggtatctgccgcataggcagtcaagaaa

SEQ ID NO: 1000 - DNA, 28 bp, Vibrio parahaemolyticus
  Vibrio parahaemolyticus GCSL_R145
gtgatctgccgcataggcagctaagaat

SEQ ID NO: 1001 - DNA, 28 bp, Vibrio parahaemolyticus
  Vibrio parahaemolyticus GCSL_R145
cctacctgctgaacaagcagtttttatt

SEQ ID NO: 1002 - DNA, 32 bp, Vibrio parahaemolyticus; identical to SEQ ID NO: 82
  Vibrio parahaemolyticus GCSL_R145

SEQ ID NO: 1003 - DNA, 18 bp, Vibrio parahaemolyticus
  Vibrio parahaemolyticus GCSL_R145
aggtctggaagaaaacaa

SEQ ID NO: 1004 - DNA, 18 bp, Vibrio parahaemolyticus
  Vibrio parahaemolyticus GCSL_R145
aggtccggaaggaagcag

SEQ ID NO: 1005 - DNA, 28 bp, Vibrio vulnificus
  Vibrio vulnificus DAL-79087
gtgtcctgccgtgtaggcagctaagaaa

SEQ ID NO: 1006 - DNA, 28 bp, Vibrio vulnificus
  Vibrio vulnificus DAL-79087
gtgtcctgccgcataggcagccaataat

SEQ ID NO: 1007 - DNA, 28 bp, Vibrio vulnificus
  Vibrio vulnificus DAL-79087
gtgacctgccgcataggcagccaagaat

SEQ ID NO: 1008 - DNA, 28 bp, Vibrio vulnificus
  Vibrio vulnificus DAL-79087
cctacctgctgaacaagcagttaataat

SEQ ID NO: 1009 - DNA, 32 bp, Vibrio vulnificus; identical to SEQ ID NO: 31
  Vibrio vulnificus DAL-79087

SEQ ID NO: 1010 - DNA, 32 bp, Vibrio vulnificus; identical to SEQ ID NO: 32
  Vibrio vulnificus DAL-79087

SEQ ID NO: 1011 - DNA, 18 bp, Vibrio vulnificus
  Vibrio vulnificus DAL-79087
aggtcaggaagaaagcaa

SEQ ID NO: 1012 - DNA, 18 bp, Vibrio vulnificus
  Vibrio vulnificus DAL-79087
aggtccggaaggaagcag

SEQ ID NO: 1013 - DNA, 28 bp, Vibrio parahaemolyticus
  Vibrio parahaemolyticus MAVP-P
gtgtcctgccgtgtaggcagctaagaaa

SEQ ID NO: 1014 - DNA, 28 bp, Vibrio parahaemolyticus
  Vibrio parahaemolyticus MAVP-P
gtgtcctgccgcataggcagccaataat

SEQ ID NO: 1015 - DNA, 28 bp, Vibrio parahaemolyticus
  Vibrio parahaemolyticus MAVP-P
gtgacctgccgtataggcagccaagaat

SEQ ID NO: 1016 - DNA, 28 bp, Vibrio parahaemolyticus
  Vibrio parahaemolyticus MAVP-P
cctacctgctgaacaagcagttaataat

SEQ ID NO: 1017 - DNA, 32 bp, Vibrio parahaemolyticus; identical to SEQ ID NO: 31
  Vibrio parahaemolyticus MAVP-P

SEQ ID NO: 1018 - DNA, 32 bp, Vibrio parahaemolyticus; identical to SEQ ID NO: 32
  Vibrio parahaemolyticus MAVP-P

SEQ ID NO: 1019 - DNA, 18 bp, Vibrio parahaemolyticus
  Vibrio parahaemolyticus MAVP-P
aggtcaggaagaaagcaa

SEQ ID NO: 1020 - DNA, 18 bp, Vibrio parahaemolyticus
  Vibrio parahaemolyticus MAVP-P
aggtccggaaggaagcag

SEQ ID NO: 1021 - DNA, 28 bp, Vibrio parahaemolyticus
  Vibrio parahaemolyticus MAVP-L
gtgtcctgccgtgtaggcagctaagaaa

SEQ ID NO: 1022 - DNA, 28 bp, Vibrio parahaemolyticus
  Vibrio parahaemolyticus MAVP-L
gtgtcctgccgcataggcagccaataat

SEQ ID NO: 1023 - DNA, 28 bp, Vibrio parahaemolyticus
  Vibrio parahaemolyticus MAVP-L
gtgacctgccgtataggcagccaagaat

SEQ ID NO: 1024 - DNA, 28 bp, Vibrio parahaemolyticus
  Vibrio parahaemolyticus MAVP-L
cctacctgctgaacaagcagttaataat

SEQ ID NO: 1025 - DNA, 32 bp, Vibrio parahaemolyticus; identical to SEQ ID NO: 31
  Vibrio parahaemolyticus MAVP-L

SEQ ID NO: 1026 - DNA, 32 bp, Vibrio parahaemolyticus; identical to SEQ ID NO: 32
  Vibrio parahaemolyticus MAVP-L

SEQ ID NO: 1027 - DNA, 18 bp, Vibrio parahaemolyticus
  Vibrio parahaemolyticus MAVP-L
aggtcaggaagaaagcaa

SEQ ID NO: 1028 - DNA, 18 bp, Vibrio parahaemolyticus
  Vibrio parahaemolyticus MAVP-L
aggtccggaaggaagcag

SEQ ID NO: 1029 - DNA, 28 bp, Vibrio parahaemolyticus
  Vibrio parahaemolyticus MAVP30
gtgtcctgccgtgtaggcagctaagaaa

SEQ ID NO: 1030 - DNA, 28 bp, Vibrio parahaemolyticus
  Vibrio parahaemolyticus MAVP30
gtgtcctgccgcataggcagccaataat

SEQ ID NO: 1031 - DNA, 28 bp, Vibrio parahaemolyticus
  Vibrio parahaemolyticus MAVP30
gtgacctgccgtataggcagccaagaat

SEQ ID NO: 1032 - DNA, 28 bp, Vibrio parahaemolyticus
  Vibrio parahaemolyticus MAVP30
cctacctgctgaacaagcagttaataat

SEQ ID NO: 1033 - DNA, 32 bp, Vibrio parahaemolyticus; identical to SEQ ID NO: 31
  Vibrio parahaemolyticus MAVP30

SEQ ID NO: 1034 - DNA, 32 bp, Vibrio parahaemolyticus; identical to SEQ ID NO: 32
  Vibrio parahaemolyticus MAVP30

SEQ ID NO: 1035 - DNA, 18 bp, Vibrio parahaemolyticus
  Vibrio parahaemolyticus MAVP30
aggtcaggaagaaagcaa

SEQ ID NO: 1036 - DNA, 18 bp, Vibrio parahaemolyticus
  Vibrio parahaemolyticus MAVP30
aggtccggaaggaagcag

SEQ ID NO: 1037 - DNA, 28 bp, Vibrio parahaemolyticus
  Vibrio parahaemolyticus MAVP75
gtgtcctgccgtgtaggcagctaagaaa

SEQ ID NO: 1038 - DNA, 28 bp, Vibrio parahaemolyticus
  Vibrio parahaemolyticus MAVP75
gtgtcctgccgcataggcagccaataat

SEQ ID NO: 1039 - DNA, 28 bp, Vibrio parahaemolyticus
  Vibrio parahaemolyticus MAVP75
gtgacctgccgtataggcagccaagaat

SEQ ID NO: 1040 - DNA, 28 bp, Vibrio parahaemolyticus
  Vibrio parahaemolyticus MAVP75
cctacctgctgaacaagcagttaataat

SEQ ID NO: 1041 - DNA, 32 bp, Vibrio parahaemolyticus; identical to SEQ ID NO: 31
  Vibrio parahaemolyticus MAVP75

SEQ ID NO: 1042 - DNA, 32 bp, Vibrio parahaemolyticus; identical to SEQ ID NO: 32
  Vibrio parahaemolyticus MAVP75

SEQ ID NO: 1043 - DNA, 18 bp, Vibrio parahaemolyticus
  Vibrio parahaemolyticus MAVP75
aggtcaggaagaaagcaa

SEQ ID NO: 1044 - DNA, 18 bp, Vibrio parahaemolyticus
  Vibrio parahaemolyticus MAVP75
aggtccggaaggaagcag

SEQ ID NO: 1045 - DNA, 28 bp, Vibrio parahaemolyticus
  Vibrio parahaemolyticus MA561
gtgtcctgccgtgtaggcagctaagaaa

SEQ ID NO: 1046 - DNA, 28 bp, Vibrio parahaemolyticus
  Vibrio parahaemolyticus MA561
gtgtcctgccgcataggcagccaataat

SEQ ID NO: 1047 - DNA, 28 bp, Vibrio parahaemolyticus
  Vibrio parahaemolyticus MA561
gtgacctgccgtataggcagccaagaat

SEQ ID NO: 1048 - DNA, 28 bp, Vibrio parahaemolyticus
  Vibrio parahaemolyticus MA561
cctacctgctgaacaagcagttaataat

SEQ ID NO: 1049 - DNA, 32 bp, Vibrio parahaemolyticus; identical to SEQ ID NO: 31
  Vibrio parahaemolyticus MA561

SEQ ID NO: 1050 - DNA, 32 bp, Vibrio parahaemolyticus; identical to SEQ ID NO: 32
  Vibrio parahaemolyticus MA561

SEQ ID NO: 1051 - DNA, 18 bp, Vibrio parahaemolyticus
  Vibrio parahaemolyticus MA561
aggtcaggaagaaagcaa

SEQ ID NO: 1052 - DNA, 18 bp, Vibrio parahaemolyticus
  Vibrio parahaemolyticus MA561
aggtccggaaggaagcag

SEQ ID NO: 1053 - DNA, 28 bp, Vibrio parahaemolyticus
  Vibrio parahaemolyticus MAVP-94
gtgtcctgccgtgtaggcagctaagaaa

SEQ ID NO: 1054 - DNA, 28 bp, Vibrio parahaemolyticus
  Vibrio parahaemolyticus MAVP-94
gtgtcctgccgcataggcagccaataat

SEQ ID NO: 1055 - DNA, 28 bp, Vibrio parahaemolyticus
  Vibrio parahaemolyticus MAVP-94
gtgacctgccgtataggcagccaagaat

SEQ ID NO: 1056 - DNA, 28 bp, Vibrio parahaemolyticus
  Vibrio parahaemolyticus MAVP-94
cctacctgctgaacaagcagttaataat

SEQ ID NO: 1057 - DNA, 32 bp, Vibrio parahaemolyticus; identical to SEQ ID NO: 31
  Vibrio parahaemolyticus MAVP-94

SEQ ID NO: 1058 - DNA, 32 bp, Vibrio parahaemolyticus; identical to SEQ ID NO: 32
  Vibrio parahaemolyticus MAVP-94

SEQ ID NO: 1059 - DNA, 18 bp, Vibrio parahaemolyticus
  Vibrio parahaemolyticus MAVP-94
aggtcaggaagaaagcaa

SEQ ID NO: 1060 - DNA, 18 bp, Vibrio parahaemolyticus
  Vibrio parahaemolyticus MAVP-94
aggtccggaaggaagcag

SEQ ID NO: 1061 - DNA, 28 bp, Pseudoalteromonas sp.
  Pseudoalteromonas sp. A757
gtgacctgccgaataggcagctggaaat

SEQ ID NO: 1062 - DNA, 28 bp, Pseudoalteromonas sp.
  Pseudoalteromonas sp. A757
gtgacctgccgtataggtagctggaaat

SEQ ID NO: 1063 - DNA, 28 bp, Pseudoalteromonas sp.
  Pseudoalteromonas sp. A757
gcgctctaccgtataggtagttggagat

SEQ ID NO: 1064 - DNA, 28 bp, Pseudoalteromonas sp.
  Pseudoalteromonas sp. A757
cttgtctgccgagtaggtagctgaaatt

SEQ ID NO: 1065 - DNA, 28 bp, Pseudoalteromonas sp.
  Pseudoalteromonas sp. A757
tacacctgccgaaaaggcagaggccaac

SEQ ID NO: 1066 - DNA, 33 bp, Pseudoalteromonas sp.
  Pseudoalteromonas sp. A757
caaacaaattcgtcgccagtttagcgtggtgtt

SEQ ID NO: 1067 - DNA, 32 bp, Pseudoalteromonas sp.
  Pseudoalteromonas sp. A757
caactaattgagcaactcgaatctgaacagga

SEQ ID NO: 1068 - DNA, 32 bp, Pseudoalteromonas sp.
  Pseudoalteromonas sp. A757
tggttagatttaagtaaggaacgtgaataata

SEQ ID NO: 1069 - DNA, 33 bp, Pseudoalteromonas sp.
  Pseudoalteromonas sp. A757
aggtctggaagtaaacaaccacatcgtatgaca

SEQ ID NO: 1070 - DNA, 33 bp, Pseudoalteromonas sp.
  Pseudoalteromonas sp. A757
aggtcgggaacgaagcagccacagcgtatgact

SEQ ID NO: 1071 - DNA, 28 bp, Vibrio toranzoniae
  Vibrio toranzoniae CECT 7225
gtgtcctgccgcataggcagctaagaat

SEQ ID NO: 1072 - DNA, 28 bp, Vibrio toranzoniae
  Vibrio toranzoniae CECT 7225
ccttcctgctgaacaagcagttagcaat

SEQ ID NO: 1073 - DNA, 18 bp, Vibrio toranzoniae
  Vibrio toranzoniae CECT 7225
aggccaggaagaaagcaa

SEQ ID NO: 1074 - DNA, 18 bp, Vibrio toranzoniae
  Vibrio toranzoniae CECT 7225
aggcctggaagggagcag

SEQ ID NO: 1075 - DNA, 28 bp, Vibrio cholerae
  Vibrio cholerae A12JL4W81
gtgttctgccgaataggcagccaagaaa

SEQ ID NO: 1076 - DNA, 28 bp, Vibrio cholerae
  Vibrio cholerae A12JL4W81
gtgttctgccgaataggcagccaagaat

SEQ ID NO: 1077 - DNA, 28 bp, Vibrio cholerae
  Vibrio cholerae A12JL4W81
cctacctgctgaacaagcagttaataat

SEQ ID NO: 1078 - DNA, 32 bp, Vibrio cholerae
  Vibrio cholerae A12JL4W81
gtccagcaatcacgagcgtgactagaaagaaa

SEQ ID NO: 1079 - DNA, 18 bp, Vibrio cholerae
  Vibrio cholerae A12JL4W81
aggtcaggaagaaagcaa

SEQ ID NO: 1080 - DNA, 18 bp, Vibrio cholerae
  Vibrio cholerae A12JL4W81
agatccggaaggaagcag

SEQ ID NO: 1081 - DNA, 28 bp, Vibrio vulnificus
  Vibrio vulnificus VV9-09
gtgacctgccgcataggcagccaagaaa

SEQ ID NO: 1082 - DNA, 28 bp, Vibrio vulnificus
  Vibrio vulnificus VV9-09
gtgacctgccgcataggcagccaagaat

SEQ ID NO: 1083 - DNA, 28 bp, Vibrio vulnificus
  Vibrio vulnificus VV9-09
cctacctgctgaacaagcagttaataat

SEQ ID NO: 1084 - DNA, 32 bp, Vibrio vulnificus; identical to SEQ ID NO: 38
  Vibrio vulnificus VV9-09

SEQ ID NO: 1085 - DNA, 18 bp, Vibrio vulnificus
  Vibrio vulnificus VV9-09
aggttaggaagaaagcaa

SEQ ID NO: 1086 - DNA, 18 bp, Vibrio vulnificus
  Vibrio vulnificus VV9-09
aggtccggaaggaagcag

SEQ ID NO: 1087 - DNA, 28 bp, Unknown
  Description of Unknown: Vibrionales bacterium sequence
  Vibrionales bacterium C3R12
gtgacctgtcgcatagacagctaggaaa

SEQ ID NO: 1088 - DNA, 28 bp, Unknown
  Description of Unknown: Vibrionales bacterium sequence
  Vibrionales bacterium C3R12
gtgacctgtcgcatagacagccaagaat

SEQ ID NO: 1089 - DNA, 28 bp, Unknown
  Description of Unknown: Vibrionales bacterium sequence
  Vibrionales bacterium C3R12
ccaatctgctgaacaagcagaaataatt

SEQ ID NO: 1090 - DNA, 32 bp, Unknown
  Description of Unknown: Vibrionales bacterium sequence
  Vibrionales bacterium C3R12
taaaggaattacgctaagtcctaatatggttg

SEQ ID NO: 1091 - DNA, 18 bp, Unknown
  Description of Unknown: Vibrionales bacterium sequence
  Vibrionales bacterium C3R12
agatcaggaagaaagcaa

SEQ ID NO: 1092 - DNA, 18 bp, Unknown
  Description of Unknown: Vibrionales bacterium sequence
  Vibrionales bacterium C3R12
agatccggaaggaagcag

SEQ ID NO: 1093 - DNA, 28 bp, Vibrio crassostreae
  Vibrio crassostreae 43_P_280
gtgtcctgccgcataggcagctaagaaa

SEQ ID NO: 1094 - DNA, 28 bp, Vibrio crassostreae
  Vibrio crassostreae 43_P_280
gtgtcctgccgcataggcagctaagaat

SEQ ID NO: 1095 - DNA, 28 bp, Vibrio crassostreae
  Vibrio crassostreae 43_P_280
ccaacctgctgaacaagcagttaagaat

SEQ ID NO: 1096 - DNA, 32 bp, Vibrio crassostreae
  Vibrio crassostreae 43_P_280
atttcaatcaatgtaccgtgacctcgaaggct

SEQ ID NO: 1097 - DNA, 18 bp, Vibrio crassostreae
  Vibrio crassostreae 43_P_280
aggccaggaagaaagcaa

SEQ ID NO: 1098 - DNA, 18 bp, Vibrio crassostreae
  Vibrio crassostreae 43_P_280
aggcctggaagggagcag

SEQ ID NO: 1099 - DNA, 28 bp, Vibrio kanaloae
  Vibrio kanaloae 10N.286.45.A9
gtgtcctgccgaataggcagctaagaaa

SEQ ID NO: 1100 - DNA, 28 bp, Vibrio kanaloae
  Vibrio kanaloae 10N.286.45.A9
gtgtcctgccgcataggcagttaggaat

SEQ ID NO: 1101 - DNA, 28 bp, Vibrio kanaloae
  Vibrio kanaloae 10N.286.45.A9
ccattctgctgaacaagcagttaaagtc

SEQ ID NO: 1102 - DNA, 32 bp, Vibrio kanaloae; identical to SEQ ID NO: 401
  Vibrio kanaloae 10N.286.45.A9

SEQ ID NO: 1103 - DNA, 18 bp, Vibrio kanaloae
  Vibrio kanaloae 10N.286.45.A9
aggccaggaagaaagcaa

SEQ ID NO: 1104 - DNA, 18 bp, Vibrio kanaloae
  Vibrio kanaloae 10N.286.45.A9
aggcctggaagggagcag

SEQ ID NO: 1105 - DNA, 28 bp, Enterovibrio coralii
  Enterovibrio coralii CAIM 912
gtgtcctgccgcataggtagctgagaaa

SEQ ID NO: 1106 - DNA, 28 bp, Enterovibrio coralii
  Enterovibrio coralii CAIM 912
gtgtactgccgcataggcagttgagata

SEQ ID NO: 1107 - DNA, 28 bp, Enterovibrio coralii
  Enterovibrio coralii CAIM 912
taaacctgccgtaaggcagaagtgaaaa

SEQ ID NO: 1108 - DNA, 32 bp, Enterovibrio coralii
  Enterovibrio coralii CAIM 912
attaggtatagcgaacaagcttccgtgtcact

SEQ ID NO: 1109 - DNA, 32 bp, Enterovibrio coralii
  Enterovibrio coralii CAIM 912
atcaattcatgatgaacgggagcgagttcagc

SEQ ID NO: 1110 - DNA, 33 bp, Enterovibrio coralii
  Enterovibrio coralii CAIM 912
aggtctggaagttagcaacccacacatggaacc

SEQ ID NO: 1111 - DNA, 33 bp, Enterovibrio coralii; identical to SEQ ID NO: 26
  Enterovibrio coralii CAIM 912

SEQ ID NO: 1112 - DNA, 28 bp, Vibrio sp.
  Vibrio sp. 2521-89
gtgttctgccgaataggcagccaagaaa

SEQ ID NO: 1113 - DNA, 28 bp, Vibrio sp.
  Vibrio sp. 2521-89
gtgttctgccgaataggcagccaagaat

SEQ ID NO: 1114 - DNA, 28 bp, Vibrio sp.
  Vibrio sp. 2521-89
cctacctgctgaacaagcagttaataat

SEQ ID NO: 1115 - DNA, 32 bp, Vibrio sp.
  Vibrio sp. 2521-89
aatgacccaaacatcgacctgccgaataaaat

SEQ ID NO: 1116 - DNA, 32 bp, Vibrio sp.; identical to SEQ ID NO: 408
  Vibrio sp. 2521-89

SEQ ID NO: 1117 - DNA, 18 bp, Vibrio sp.
  Vibrio sp. 2521-89
aggtcaggaagaaagcaa

SEQ ID NO: 1118 - DNA, 18 bp, Vibrio sp.
  Vibrio sp. 2521-89
agatccggaaggaagcag

SEQ ID NO: 1119 - DNA, 28 bp, Vibrio diazotrophicus
  Vibrio diazotrophicus 65.10M
gtgttccgccgagtaggcggctaagaat

SEQ ID NO: 1120 - DNA, 28 bp, Vibrio diazotrophicus
  Vibrio diazotrophicus 65.10M
gtgttccgccgaataggcggctaagaat

SEQ ID NO: 1121 - DNA, 32 bp, Vibrio diazotrophicus
  Vibrio diazotrophicus 65.10M
attggaacattccaacgaggttactacaaggc

SEQ ID NO: 1122 - DNA, 28 bp, Vibrio vulnificus
  Vibrio vulnificus 95-8-161
gtgtcctgccgtgtaggcagctaagaaa

SEQ ID NO: 1123 - DNA, 28 bp, Vibrio vulnificus
  Vibrio vulnificus 95-8-161
gtgtcctgccgcataggcagccaagaat

SEQ ID NO: 1124 - DNA, 28 bp, Vibrio vulnificus
  Vibrio vulnificus 95-8-161
cctacctgttgaacaagcagttaataat

SEQ ID NO: 1125 - DNA, 32 bp, Vibrio vulnificus; identical to SEQ ID NO: 451
  Vibrio vulnificus 95-8-161

SEQ ID NO: 1126 - DNA, 32 bp, Vibrio vulnificus; identical to SEQ ID NO: 452
  Vibrio vulnificus 95-8-161

SEQ ID NO: 1127 - DNA, 18 bp, Vibrio vulnificus
  Vibrio vulnificus 95-8-161
aggtcaggaagaaagcaa

SEQ ID NO: 1128 - DNA, 18 bp, Vibrio vulnificus
  Vibrio vulnificus 95-8-161
aggtccggaaggaagcag

SEQ ID NO: 1129 - DNA, 28 bp, Aeromonas veronii
  Aeromonas veronii ML09-123
gtgaactgccgcataggcagccaagaaa

SEQ ID NO: 1130 - DNA, 28 bp, Aeromonas veronii
  Aeromonas veronii ML09-123
gtgaactgccgcataggcagccaagatt

SEQ ID NO: 1131 - DNA, 28 bp, Aeromonas veronii
  Aeromonas veronii ML09-123
gttttctgccggaaaggcagtttttagt

SEQ ID NO: 1132 - DNA, 32 bp, Aeromonas veronii
  Aeromonas veronii ML09-123
cgccattgctcggggtggccagcggagcgcac

SEQ ID NO: 1133 - DNA, 32 bp, Aeromonas veronii; identical to SEQ ID NO: 378
  Aeromonas veronii ML09-123

SEQ ID NO: 1134 - DNA, 32 bp, Aeromonas veronii; identical to SEQ ID NO: 379
  Aeromonas veronii ML09-123

SEQ ID NO: 1135 - DNA, 28 bp, Vibrio vulnificus
  Vibrio vulnificus VA-WGS-18036
gtgtcctgccgtgtaggcagctaagaaa

SEQ ID NO: 1136 - DNA, 28 bp, Vibrio vulnificus
  Vibrio vulnificus VA-WGS-18036
gtgtcctgccgcataggcagccaagaat

SEQ ID NO: 1137 - DNA, 28 bp, Vibrio vulnificus
  Vibrio vulnificus VA-WGS-18036
cctacctgctgaacaagcagtgaataat

SEQ ID NO: 1138 - DNA, 32 bp, Vibrio vulnificus
  Vibrio vulnificus VA-WGS-18036
catgatttcggtgatggaacaatgcaaatttg

SEQ ID NO: 1139 - DNA, 18 bp, Vibrio vulnificus
  Vibrio vulnificus VA-WGS-18036
aggtcaggaaggaagcaa

SEQ ID NO: 1140 - DNA, 18 bp, Vibrio vulnificus
  Vibrio vulnificus VA-WGS-18036
aggtccggaaggaagcag

SEQ ID NO: 1141 - DNA, 28 bp, Vibrio parahaemolyticus
  Vibrio parahaemolyticus B6_4
gtgtcctgccgtgtaggcagctaagaaa

SEQ ID NO: 1142 - DNA, 28 bp, Vibrio parahaemolyticus
  Vibrio parahaemolyticus B6_4
gtgtcctgccgcataggcagccaataat

SEQ ID NO: 1143 - DNA, 28 bp, Vibrio parahaemolyticus
  Vibrio parahaemolyticus B6_4
gtgacctgccgtataggcagccaagaat

SEQ ID NO: 1144 - DNA, 28 bp, Vibrio parahaemolyticus
  Vibrio parahaemolyticus B6_4
cctacctgctgaacaagcagttaataat

SEQ ID NO: 1145 - DNA, 32 bp, Vibrio parahaemolyticus; identical to SEQ ID NO: 31
  Vibrio parahaemolyticus B6_4

SEQ ID NO: 1146 - DNA, 32 bp, Vibrio parahaemolyticus; identical to SEQ ID NO: 32
  Vibrio parahaemolyticus B6_4

SEQ ID NO: 1147 - DNA, 18 bp, Vibrio parahaemolyticus
  Vibrio parahaemolyticus B6_4
aggtcaggaagaaagcaa

SEQ ID NO: 1148 - DNA, 18 bp, Vibrio parahaemolyticus
  Vibrio parahaemolyticus B6_4
aggtccggaaggaagcag

SEQ ID NO: 1149 - DNA, 28 bp, Vibrio sinaloensis
  Vibrio sinaloensis AD048
gtgtcctgccgcataggcagctaagaaa

SEQ ID NO: 1150 - DNA, 28 bp, Vibrio sinaloensis
  Vibrio sinaloensis AD048
gtgtcctgccgcataggcagctaagaat

SEQ ID NO: 1151 - DNA, 28 bp, Vibrio sinaloensis
  Vibrio sinaloensis AD048
ccaacctgctgaacaagcagttaagaat

SEQ ID NO: 1152 - DNA, 32 bp, Vibrio sinaloensis
  Vibrio sinaloensis AD048
tcgatagcttcacaccaagccgcactgtaaac

SEQ ID NO: 1153 - DNA, 18 bp, Vibrio sinaloensis
  Vibrio sinaloensis AD048
aggtcaggaagaaagcaa

SEQ ID NO: 1154 - DNA, 18 bp, Vibrio sinaloensis
  Vibrio sinaloensis AD048
aggtccggaaggaagcag

SEQ ID NO: 1155 - DNA, 28 bp, Vibrio vulnificus
  Vibrio vulnificus Vv002
gtgtcctgccgtgtaggcagctaagaaa

SEQ ID NO: 1156 - DNA, 28 bp, Vibrio vulnificus
  Vibrio vulnificus Vv002
gtgtcctgccgcataggcagccaagaat

SEQ ID NO: 1157 - DNA, 28 bp, Vibrio vulnificus
  Vibrio vulnificus Vv002
cctacctgctgaacaagcagtgaataat

SEQ ID NO: 1158 - DNA, 32 bp, Vibrio vulnificus; identical to SEQ ID NO: 1138
  Vibrio vulnificus Vv002

SEQ ID NO: 1159 - DNA, 18 bp, Vibrio vulnificus
  Vibrio vulnificus Vv002
aggtcaggaaggaagcaa

SEQ ID NO: 1160 - DNA, 18 bp, Vibrio vulnificus
  Vibrio vulnificus Vv002
aggtccggaaggaagcag

SEQ ID NO: 1161 - DNA, 28 bp, Vibrio alginolyticus
  Vibrio alginolyticus UCD-30C
gtgtcctgccgcataggcagctaaaaat

SEQ ID NO: 1162 - DNA, 28 bp, Vibrio alginolyticus
  Vibrio alginolyticus UCD-30C
gtgtcctgccgcataggcagctaagaat

SEQ ID NO: 1163 - DNA, 28 bp, Vibrio alginolyticus
  Vibrio alginolyticus UCD-30C
ccgacctgctgaacaagcagttagaagc

SEQ ID NO: 1164 - DNA, 32 bp, Vibrio alginolyticus; identical to SEQ ID NO: 639
  Vibrio alginolyticus UCD-30C

SEQ ID NO: 1165 - DNA, 18 bp, Vibrio alginolyticus
  Vibrio alginolyticus UCD-30C
aggtcaggaagaaaacaa

SEQ ID NO: 1166 - DNA, 18 bp, Vibrio alginolyticus
  Vibrio alginolyticus UCD-30C
aggtccggaaggaagcag

SEQ ID NO: 1167 - DNA, 28 bp, Vibrio crassostreae
  Vibrio crassostreae J2-9
gtgacctgccgcataggcagctaagaat

SEQ ID NO: 1168 - DNA, 28 bp, Vibrio crassostreae
  Vibrio crassostreae J2-9
ccttcctgctgaacaagcagttaaaatc

SEQ ID NO: 1169 - DNA, 32 bp, Vibrio crassostreae; identical to SEQ ID NO: 395
  Vibrio crassostreae J2-9

SEQ ID NO: 1170 - DNA, 18 bp, Vibrio crassostreae
  Vibrio crassostreae J2-9
aggccaggaagaaagcaa

SEQ ID NO: 1171 - DNA, 18 bp, Vibrio crassostreae
  Vibrio crassostreae J2-9
aggcctggaagggagcag

SEQ ID NO: 1172 - DNA, 28 bp, Vibrio splendidus
  Vibrio splendidus 10N.286.45.A10
gtgtcctgccgcataggcagctaagaaa

SEQ ID NO: 1173 - DNA, 28 bp, Vibrio splendidus
  Vibrio splendidus 10N.286.45.A10
gtctcctgccgcataggcagctaagaat

SEQ ID NO: 1174 - DNA, 28 bp, Vibrio splendidus
  Vibrio splendidus 10N.286.45.A10
ccttcctgctgaacaagcagttaaaatc

SEQ ID NO: 1175 - DNA, 32 bp, Vibrio splendidus
  Vibrio splendidus 10N.286.45.A10
tagagcgcgttgtatagctgacaattcgatac

SEQ ID NO: 1176 - DNA, 18 bp, Vibrio splendidus
  Vibrio splendidus 10N.286.45.A10
aggccaggaagaaagcaa

SEQ ID NO: 1177 - DNA, 18 bp, Vibrio splendidus
  Vibrio splendidus 10N.286.45.A10
aggcctggaagggagcag

SEQ ID NO: 1178 - DNA, 28 bp, Vibrio campbellii
  Vibrio campbellii ABR2-13
gtgtcctgccgcataggcagccaagaat

SEQ ID NO: 1179 - DNA, 28 bp, Vibrio campbellii
  Vibrio campbellii ABR2-13
gtgtcctgccgcgtaggcagctaagaat

SEQ ID NO: 1180 - DNA, 28 bp, Vibrio campbellii
  Vibrio campbellii ABR2-13
ccgacctgctgaacaagcagttaataaa

SEQ ID NO: 1181 - DNA, 32 bp, Vibrio campbellii
  Vibrio campbellii ABR2-13
aagcgggtctatgaattgagacatgttgataa

SEQ ID NO: 1182 - DNA, 32 bp, Vibrio campbellii
  Vibrio campbellii ABR2-13
ttcaggggccgttcttttaacattggcaccaa

SEQ ID NO: 1183 - DNA, 32 bp, Vibrio campbellii
  Vibrio campbellii ABR2-13
ataacatgaccttatttggagaattctacgaa

SEQ ID NO: 1184 - DNA, 18 bp, Vibrio campbellii
  Vibrio campbellii ABR2-13
aggtcaggaagaaagcaa

SEQ ID NO: 1185 - DNA, 18 bp, Vibrio campbellii
  Vibrio campbellii ABR2-13
aggtccggaaggaagcag

SEQ ID NO: 1186 - DNA, 28 bp, Photobacterium damselae
  Photobacterium damselae NCTC11648
gtgtcctgccgtataggcagctaaaaat

SEQ ID NO: 1187 - DNA, 28 bp, Photobacterium damselae
  Photobacterium damselae NCTC11648
gtgtcctgccgtataggcagctaagaat

SEQ ID NO: 1188 - DNA, 28 bp, Photobacterium damselae
  Photobacterium damselae NCTC11648
cctacctgctgaacaagcagttaataac

SEQ ID NO: 1189 - DNA, 32 bp, Photobacterium damselae
  Photobacterium damselae NCTC11648
aaaaagataggtataaattcaactcctgccct

SEQ ID NO: 1190 - DNA, 32 bp, Photobacterium damselae
  Photobacterium damselae NCTC11648
cacatgtaatcaacattaccaatccttgtttt

SEQ ID NO: 1191 - DNA, 18 bp, Photobacterium damselae
  Photobacterium damselae NCTC11648
aggtcagggagaaagcaa

SEQ ID NO: 1192 - DNA, 18 bp, Photobacterium damselae
  Photobacterium damselae NCTC11648
aggtccggaaggaagcag

SEQ ID NO: 1193 - DNA, 28 bp, Vibrio anguillarum
  Vibrio anguillarum DSM 21597
gtgacctgccgcataggcagccaagaaa

SEQ ID NO: 1194 - DNA, 28 bp, Vibrio anguillarum
  Vibrio anguillarum DSM 21597
gtgacctgccgcataggcagctaagaat

SEQ ID NO: 1195 - DNA, 28 bp, Vibrio anguillarum
  Vibrio anguillarum DSM 21597
cctgcctgctgaacaagcagttaataaa

SEQ ID NO: 1196 - DNA, 32 bp, Vibrio anguillarum; identical to SEQ ID NO: 564
  Vibrio anguillarum DSM 21597

SEQ ID NO: 1197 - DNA, 18 bp, Vibrio anguillarum
  Vibrio anguillarum DSM 21597
aggtcaggaagaaagcaa

SEQ ID NO: 1198 - DNA, 18 bp, Vibrio anguillarum
  Vibrio anguillarum DSM 21597
aggcccggaagggagcag

SEQ ID NO: 1199 - DNA, 28 bp, Vibrio cyclitrophicus
  Vibrio cyclitrophicus 10N.286.54.C7
gtgtcctgccgaataggcagctaagaaa

SEQ ID NO: 1200 - DNA, 28 bp, Vibrio cyclitrophicus
  Vibrio cyclitrophicus 10N.286.54.C7
gtgtcctgccgaataggcagctaagaat

SEQ ID NO: 1201 - DNA, 28 bp, Vibrio cyclitrophicus
  Vibrio cyclitrophicus 10N.286.54.C7
ccttcctgctgaacaagcagttaataat

SEQ ID NO: 1202 - DNA, 32 bp, Vibrio cyclitrophicus; identical to SEQ ID NO: 496
  Vibrio cyclitrophicus 10N.286.54.C7

SEQ ID NO: 1203 - DNA, 18 bp, Vibrio cyclitrophicus
  Vibrio cyclitrophicus 10N.286.54.C7
aggccaggaagaaagcaa

SEQ ID NO: 1204 - DNA, 18 bp, Vibrio cyclitrophicus
  Vibrio cyclitrophicus 10N.286.54.C7
aggcctggaagggagcag

SEQ ID NO: 1205 - DNA, 28 bp, Vibrio lentus
  Vibrio lentus 10N.286.49.C5
gtgtcctgccgaataggcagctaagaaa

SEQ ID NO: 1206 - DNA, 28 bp, Vibrio lentus
  Vibrio lentus 10N.286.49.C5
gtgtcctgccgaataggcagctaagaat

SEQ ID NO: 1207 - DNA, 28 bp, Vibrio lentus
  Vibrio lentus 10N.286.49.C5
ccaacctgctgaacaagcagctaagaat

SEQ ID NO: 1208 - DNA, 32 bp, Vibrio lentus; identical to SEQ ID NO: 484
  Vibrio lentus 10N.286.49.C5

SEQ ID NO: 1209 - DNA, 18 bp, Vibrio lentus
  Vibrio lentus 10N.286.49.C5
aggccaggaagaaagcaa

SEQ ID NO: 1210 - DNA, 18 bp, Vibrio lentus
  Vibrio lentus 10N.286.49.C5
aggcctggaagggagcag

SEQ ID NO: 1211 - DNA, 28 bp, Vibrio lentus
  Vibrio lentus 10N.261.48.B11
gtgtcctgccgcataggcagctaagaaa

SEQ ID NO: 1212 - DNA, 28 bp, Vibrio lentus
  Vibrio lentus 10N.261.48.B11
gtgtcctgccgcataggcagctaagaat

SEQ ID NO: 1213 - DNA, 28 bp, Vibrio lentus
  Vibrio lentus 10N.261.48.B11
ccttcctgctgaacaagcagttaataat

SEQ ID NO: 1214 - DNA, 32 bp, Vibrio lentus; identical to SEQ ID NO: 338
  Vibrio lentus 10N.261.48.B11

SEQ ID NO: 1215 - DNA, 18 bp, Vibrio lentus
  Vibrio lentus 10N.261.48.B11
aggccaggaagaaagcaa

SEQ ID NO: 1216 - DNA, 18 bp, Vibrio lentus
  Vibrio lentus 10N.261.48.B11
aggcctggaagggagcag

SEQ ID NO: 1217 - DNA, 28 bp, Vibrio diazotrophicus
  Vibrio diazotrophicus 60.6F
gtgttccgccgaataggcggctaagaaa

SEQ ID NO: 1218 - DNA, 28 bp, Vibrio diazotrophicus
  Vibrio diazotrophicus 60.6F
gtgttccgccgcataggcggttaaaaat

SEQ ID NO: 1219 - DNA, 32 bp, Vibrio diazotrophicus
  Vibrio diazotrophicus 60.6F
aaccctgattggcataactatacggtcggagt

SEQ ID NO: 1220 - DNA, 32 bp, Vibrio diazotrophicus
  Vibrio diazotrophicus 60.6F
atcgttaacagggatgttattgcaaagaccac

SEQ ID NO: 1221 - DNA, 28 bp, Vibrio crassostreae
  Vibrio crassostreae LGP107
gtgacctgccgcataggcagctaagaac

SEQ ID NO: 1222 - DNA, 28 bp, Vibrio crassostreae
  Vibrio crassostreae LGP107
gtgtcctgccgcataggcagctaagaat

SEQ ID NO: 1223 - DNA, 28 bp, Vibrio crassostreae
  Vibrio crassostreae LGP107
ccttcctgctgaacaagtagttaaaatc

SEQ ID NO: 1224 - DNA, 31 bp, Vibrio crassostreae; identical to SEQ ID NO: 50
  Vibrio crassostreae LGP107

SEQ ID NO: 1225 - DNA, 18 bp, Vibrio crassostreae
  Vibrio crassostreae LGP107
aggccaggaagaaagcaa

SEQ ID NO: 1226 - DNA, 18 bp, Vibrio crassostreae
  Vibrio crassostreae LGP107
aggcctggaagggagcag

SEQ ID NO: 1227 - DNA, 28 bp, Pseudoalteromonas translucida
  Pseudoalteromonas translucida KMM 520
gtgaactgccgagtaggcagctggaaat

SEQ ID NO: 1228 - DNA, 28 bp, Pseudoalteromonas translucida
  Pseudoalteromonas translucida KMM 520
gtgaactgccgagtaggcagctgaagtt

SEQ ID NO: 1229 - DNA, 28 bp, Pseudoalteromonas translucida
  Pseudoalteromonas translucida KMM 520
tttaactgccgaaaaggcagagggtaaa

SEQ ID NO: 1230 - DNA, 32 bp, Pseudoalteromonas translucida
  Pseudoalteromonas translucida KMM 520
atttagaatttttgacgtcaactccgctaagt

SEQ ID NO: 1231 - DNA, 33 bp, Pseudoalteromonas translucida; identical to SEQ ID NO: 285
  Pseudoalteromonas translucida KMM 520

SEQ ID NO: 1232 - DNA, 33 bp, Pseudoalteromonas translucida; identical to SEQ ID NO: 20
  Pseudoalteromonas translucida KMM 520

SEQ ID NO: 1233 - DNA, 28 bp, Vibrio coralliilyticus
  Vibrio coralliilyticus AIC-7
gtgtcctgccgtgtaggcagctaagaaa

SEQ ID NO: 1234 - DNA, 28 bp, Vibrio coralliilyticus
  Vibrio coralliilyticus AIC-7
gtgtcctgccgcctagttagccaagaaa

SEQ ID NO: 1235 - DNA, 28 bp, Vibrio coralliilyticus
  Vibrio coralliilyticus AIC-7
gtatcctgccgcataggcagttaagaat

SEQ ID NO: 1236 - DNA, 28 bp, Vibrio coralliilyticus
  Vibrio coralliilyticus AIC-7
ctatcctgctgaaaaagcagttgggaat

SEQ ID NO: 1237 - DNA, 32 bp, Vibrio coralliilyticus; identical to SEQ ID NO: 31
  Vibrio coralliilyticus AIC-7

SEQ ID NO: 1238 - DNA, 32 bp, Vibrio coralliilyticus
  Vibrio coralliilyticus AIC-7
cttttaccaaaccacaacatctagtatcggtc

SEQ ID NO: 1239 - DNA, 18 bp, Vibrio coralliilyticus
  Vibrio coralliilyticus AIC-7
aggtccggaagaaagcag

SEQ ID NO: 1240 - DNA, 18 bp, Vibrio coralliilyticus
  Vibrio coralliilyticus AIC-7
aggtccggaaggaagcag

SEQ ID NO: 1241 - DNA, 28 bp, Vibrio tasmaniensis
  Vibrio tasmaniensis 10N.261.52.A6
gtgtcctgccgcataggcagctaagaaa

SEQ ID NO: 1242 - DNA, 28 bp, Vibrio tasmaniensis
  Vibrio tasmaniensis 10N.261.52.A6
gtgtcctgccgcataggcagctaagaat

SEQ ID NO: 1243 - DNA, 28 bp, Vibrio tasmaniensis
  Vibrio tasmaniensis 10N.261.52.A6
ccttcctgctgaacaagcagttaataat

SEQ ID NO: 1244 - DNA, 32 bp, Vibrio tasmaniensis; identical to SEQ ID NO: 150
  Vibrio tasmaniensis 10N.261.52.A6

SEQ ID NO: 1245 - DNA, 18 bp, Vibrio tasmaniensis
  Vibrio tasmaniensis 10N.261.52.A6
aggccaggaagaaagcaa

SEQ ID NO: 1246 - DNA, 18 bp, Vibrio tasmaniensis
  Vibrio tasmaniensis 10N.261.52.A6
aggcctggaagggagcag

SEQ ID NO: 1247 - DNA, 28 bp, Vibrio lentus
  Vibrio lentus 10N.261.52.C5
gtgtcctgccgcataggcagctaagaaa

SEQ ID NO: 1248 - DNA, 28 bp, Vibrio lentus
  Vibrio lentus 10N.261.52.C5
gtgtcctgccgcataggcagctaagaat

SEQ ID NO: 1249 - DNA, 28 bp, Vibrio lentus
  Vibrio lentus 10N.261.52.C5
ccttcctgctgaacaagcagttaataat

SEQ ID NO: 1250 - DNA, 32 bp, Vibrio lentus; identical to SEQ ID NO: 338
  Vibrio lentus 10N.261.52.C5

SEQ ID NO: 1251 - DNA, 18 bp, Vibrio lentus
  Vibrio lentus 10N.261.52.C5
aggccaggaagaaagcaa

SEQ ID NO: 1252 - DNA, 18 bp, Vibrio lentus
  Vibrio lentus 10N.261.52.C5
aggcctggaagggagcag

SEQ ID NO: 1253 - DNA, 28 bp, Vibrio crassostreae
  Vibrio crassostreae 26_O_11
gtgacctgccgcataggcagctaagaac

SEQ ID NO: 1254 - DNA, 28 bp, Vibrio crassostreae
  Vibrio crassostreae 26_O_11
gtgtcctgccgcataggcagctaagaat

SEQ ID NO: 1255 - DNA, 28 bp, Vibrio crassostreae
  Vibrio crassostreae 26_O_11
ccttcctgctgaacaagtagttaaaatc

SEQ ID NO: 1256 - DNA, 31 bp, Vibrio crassostreae; identical to SEQ ID NO: 50
  Vibrio crassostreae 26_O_11

SEQ ID NO: 1257 - DNA, 18 bp, Vibrio crassostreae
  Vibrio crassostreae 26_O_11
aggccaggaagaaagcaa

SEQ ID NO: 1258 - DNA, 18 bp, Vibrio crassostreae
  Vibrio crassostreae 26_O_11
aggcctggaagggagcag

SEQ ID NO: 1259 - DNA, 28 bp, Vibrio crassostreae
  Vibrio crassostreae 38_P_219
gtgtactgccgaataggcagctaagaaa

SEQ ID NO: 1260 - DNA, 28 bp, Vibrio crassostreae
  Vibrio crassostreae 38_P_219
gtgtcctgccgcataggcagctaagaat

SEQ ID NO: 1261 - DNA, 28 bp, Vibrio crassostreae
  Vibrio crassostreae 38_P_219
cctgcctgctgaacaagcagttaagaat

SEQ ID NO: 1262 - DNA, 32 bp, Vibrio crassostreae
  Vibrio crassostreae 38_P_219
attacgaggaatgtatggccgagtcatttcta

SEQ ID NO: 1263 - DNA, 18 bp, Vibrio crassostreae
  Vibrio crassostreae 38_P_219
aggccaggaagaaagcaa

SEQ ID NO: 1264 - DNA, 18 bp, Vibrio crassostreae
  Vibrio crassostreae 38_P_219
aggcctggaagggagcag

SEQ ID NO: 1265 - DNA, 28 bp, Vibrio crassostreae
  Vibrio crassostreae 30_P_64
gtgacctgccgcataggcagctaagaat

SEQ ID NO: 1266 - DNA, 28 bp, Vibrio crassostreae
  Vibrio crassostreae 30_P_64
ccttcctgctgaacaagcagttaaaatc

SEQ ID NO: 1267 - DNA, 32 bp, Vibrio crassostreae; identical to SEQ ID NO: 395
  Vibrio crassostreae 30_P_64

SEQ ID NO: 1268 - DNA, 18 bp, Vibrio crassostreae
  Vibrio crassostreae 30_P_64
aggccaggaagaaagcaa

SEQ ID NO: 1269 - DNA, 18 bp, Vibrio crassostreae
  Vibrio crassostreae 30_P_64
aggcctggaagggagcag

SEQ ID NO: 1270 - DNA, 28 bp, Shewanella sp.
  Shewanella sp. ANA-3
gtgacctgccgaataggcagctgaaaat

SEQ ID NO: 1271 - DNA, 28 bp, Shewanella sp.
  Shewanella sp. ANA-3
gatacccgccgaaaaggcagcaaaacct

SEQ ID NO: 1272 - DNA, 32 bp, Shewanella sp.
  Shewanella sp. ANA-3
gtttaggaaaatggcaaactcagccccaaact

SEQ ID NO: 1273 - DNA, 32 bp, Shewanella sp.
  Shewanella sp. ANA-3
gtttgattttaaagaaggtcttgataaatagt

SEQ ID NO: 1274 - DNA, 32 bp, Shewanella sp.
  Shewanella sp. ANA-3
agcgtggggtaatcgaggtggtctgcttcatc

SEQ ID NO: 1275 - DNA, 32 bp, Shewanella sp.
  Shewanella sp. ANA-3
atttaggaaaatggcaaactcagccccaaact

SEQ ID NO: 1276 - DNA, 32 bp, Shewanella sp.
  Shewanella sp. ANA-3
cgtgaaaatcgtcatttacaagttgactttga

SEQ ID NO: 1277 - DNA, 32 bp, Shewanella sp.
  Shewanella sp. ANA-3
cgcgagaatcgtcattttcaagtagattttga

SEQ ID NO: 1278 - DNA, 28 bp, Vibrio sp.
  Vibrio sp. 10N.286.45.B6
gtgacctgccgcataggcagctaagaaa

SEQ ID NO: 1279 - DNA, 28 bp, Vibrio sp.
  Vibrio sp. 10N.286.45.B6
gtgtcctgccgcataggcagttaagaat

SEQ ID NO: 1280 - DNA, 28 bp, Vibrio sp.
  Vibrio sp. 10N.286.45.B6
ccatcctgctgaacaagcagttaataat

SEQ ID NO: 1281 - DNA, 32 bp, Vibrio sp.; identical to SEQ ID NO: 275
  Vibrio sp. 10N.286.45.B6

SEQ ID NO: 1282 - DNA, 32 bp, Vibrio sp.; identical to SEQ ID NO: 276
  Vibrio sp. 10N.286.45.B6

SEQ ID NO: 1283 - DNA, 32 bp, Vibrio sp.; identical to SEQ ID NO: 277
  Vibrio sp. 10N.286.45.B6

SEQ ID NO: 1284 - DNA, 18 bp, Vibrio sp.
  Vibrio sp. 10N.286.45.B6
aggccaggaagaaagcaa

SEQ ID NO: 1285 - DNA, 32 bp, Vibrio sp.; identical to SEQ ID NO: 279
  Vibrio sp. 10N.286.45.B6

SEQ ID NO: 1286 - DNA, 28 bp, Pseudoalteromonas arctica
  Pseudoalteromonas arctica A 37-1-2
gtgacctgccgagtaggcagctgagaat

SEQ ID NO: 1287 - DNA, 28 bp, Pseudoalteromonas arctica
  Pseudoalteromonas arctica A 37-1-2
gtgatctgccgtataggcagctgataat

SEQ ID NO: 1288 - DNA, 28 bp, Pseudoalteromonas arctica
  Pseudoalteromonas arctica A 37-1-2
gtgacctgccgtataggcagctgaagat

SEQ ID NO: 1289 - DNA, 28 bp, Pseudoalteromonas arctica
  Pseudoalteromonas arctica A 37-1-2
taactctgccgaaaaggcagtgagtagt

SEQ ID NO: 1290 - DNA, 32 bp, Pseudoalteromonas arctica; identical to SEQ ID NO: 314
  Pseudoalteromonas arctica A 37-1-2

SEQ ID NO: 1291 - DNA, 32 bp, Pseudoalteromonas arctica
  Pseudoalteromonas arctica A 37-1-2
gacggttctattataatagttgaccgctcaat

SEQ ID NO: 1292 - DNA, 31 bp, Pseudoalteromonas arctica; identical to SEQ ID NO: 315
  Pseudoalteromonas arctica A 37-1-2

SEQ ID NO: 1293 - DNA, 31 bp, Pseudoalteromonas arctica
  Pseudoalteromonas arctica A 37-1-2
aaaaagaaccgttttgatgtctatgtaaaag

SEQ ID NO: 1294 - DNA, 28 bp, Photobacterium kishitanii
  Photobacterium kishitanii GCSL-P50
gtgaacagccgcgtaggccgctaagaaa

SEQ ID NO: 1295 - DNA, 28 bp, Photobacterium kishitanii
  Photobacterium kishitanii GCSL-P50
gtaaacagccgtgtaggcagctaagaaa

SEQ ID NO: 1296 - DNA, 28 bp, Photobacterium kishitanii
  Photobacterium kishitanii GCSL-P50
gtgaacagccggataggcagctaagaaa

SEQ ID NO: 1297 - DNA, 28 bp, Photobacterium kishitanii
  Photobacterium kishitanii GCSL-P50
gtgaacagccgcgtaggcagctaagaaa

SEQ ID NO: 1298 - DNA, 32 bp, Photobacterium kishitanii
  Photobacterium kishitanii GCSL-P50
tggttagtagtagcgttagtcagtggcttagt

SEQ ID NO: 1299 - DNA, 32 bp, Photobacterium kishitanii
  Photobacterium kishitanii GCSL-P50
aagtaaagcgggaatagtgatttagtaaatag

SEQ ID NO: 1300 - DNA, 32 bp, Photobacterium kishitanii
  Photobacterium kishitanii GCSL-P50
tcgctgcaatgtaaagtttgcaaggtgttagc

SEQ ID NO: 1301 - DNA, 32 bp, Photobacterium kishitanii
  Photobacterium kishitanii GCSL-P50
tcgggcgcgttttcaatgtcattaagaatgcg

SEQ ID NO: 1302 - DNA, 32 bp, Photobacterium kishitanii
  Photobacterium kishitanii GCSL-P50
aagcaaagtgggaatagtgatttagtaaatag

SEQ ID NO: 1303 - DNA, 28 bp, Pseudoalteromonas arctica
  Pseudoalteromonas arctica MelAa3
gtgacctgccgagtaggcagctgagaat

SEQ ID NO: 1304 - DNA, 28 bp, Pseudoalteromonas arctica
  Pseudoalteromonas arctica MelAa3
gtgatctgccgtataggcagctgaagat

SEQ ID NO: 1305 - DNA, 28 bp, Pseudoalteromonas arctica
  Pseudoalteromonas arctica MelAa3
taactctgccgaaaaggcagtgagtagt

SEQ ID NO: 1306 - DNA, 32 bp, Pseudoalteromonas arctica; identical to SEQ ID NO: 314
  Pseudoalteromonas arctica MelAa3

SEQ ID NO: 1307 - DNA, 31 bp, Pseudoalteromonas arctica; identical to SEQ ID NO: 315
  Pseudoalteromonas arctica MelAa3

SEQ ID NO: 1308 - DNA, 31 bp, Pseudoalteromonas arctica; identical to SEQ ID NO: 328
  Pseudoalteromonas arctica MelAa3

SEQ ID NO: 1309 - DNA, 28 bp, Vibrio splendidus
  Vibrio splendidus 10N.222.46.B1
gtgacctgccgcataggcagctaagaaa

SEQ ID NO: 1310 - DNA, 28 bp, Vibrio splendidus
  Vibrio splendidus 10N.222.46.B1
gtgtcctgccgcataggcagttaagaat

SEQ ID NO: 1311 - DNA, 28 bp, Vibrio splendidus
  Vibrio splendidus 10N.222.46.B1
ccatcctgctgaacaagcagttaataat

SEQ ID NO: 1312 - DNA, 32 bp, Vibrio splendidus; identical to SEQ ID NO: 275
  Vibrio splendidus 10N.222.46.B1

SEQ ID NO: 1313 - DNA, 32 bp, Vibrio splendidus; identical to SEQ ID NO: 276
  Vibrio splendidus 10N.222.46.B1

SEQ ID NO: 1314 - DNA, 32 bp, Vibrio splendidus; identical to SEQ ID NO: 277
  Vibrio splendidus 10N.222.46.B1

SEQ ID NO: 1315 - DNA, 18 bp, Vibrio splendidus
  Vibrio splendidus 10N.222.46.B1
aggccaggaagaaagcaa

SEQ ID NO: 1316 - DNA, 18 bp, Vibrio splendidus
  Vibrio splendidus 10N.222.46.B1
aggcctggaagggagcag

SEQ ID NO: 1317 - DNA, 28 bp, Vibrio breoganii
  Vibrio breoganii 10N.222.51.B10
gtgaactgccgcataggcagctaagaaa

SEQ ID NO: 1318 - DNA, 28 bp, Vibrio breoganii
  Vibrio breoganii 10N.222.51.B10
ccattctgctgaacaagcagtcgagtat

SEQ ID NO: 1319 - DNA, 32 bp, Vibrio breoganii; identical to SEQ ID NO: 144
  Vibrio breoganii 10N.222.51.B10

SEQ ID NO: 1320 - DNA, 18 bp, Vibrio breoganii
  Vibrio breoganii 10N.222.51.B10
aggtcaggaagaaagcaa

SEQ ID NO: 1321 - DNA, 18 bp, Vibrio breoganii
  Vibrio breoganii 10N.222.51.B10
agatccggaaggaagcag

SEQ ID NO: 1322 - DNA, 28 bp, Enterovibrio norvegicus
  Enterovibrio norvegicus 10N.261.45.A10
gtgtcctgccgcacaggtagctgagaaa

SEQ ID NO: 1323 - DNA, 28 bp, Enterovibrio norvegicus
  Enterovibrio norvegicus 10N.261.45.A10
gtgtcctgccgcacaggtagttgagata

SEQ ID NO: 1324 - DNA, 28 bp, Enterovibrio norvegicus
  Enterovibrio norvegicus 10N.261.45.A10
taaccctgccgcaaggcagaaatgaaaa

SEQ ID NO: 1325 - DNA, 28 bp, Enterovibrio norvegicus
  Enterovibrio norvegicus 10N.261.45.A10
aatggaagccccataggtttcctcgcag

SEQ ID NO: 1326 - DNA, 32 bp, Enterovibrio norvegicus
  Enterovibrio norvegicus 10N.261.45.A10
aaacacatctaaaagtagtgcaattgcttctt

SEQ ID NO: 1327 - DNA, 32 bp, Enterovibrio norvegicus
  Enterovibrio norvegicus 10N.261.45.A10
agtgtatttacccaaccgttttgcggtttcta

SEQ ID NO: 1328 - DNA, 33 bp, Enterovibrio norvegicus
  Enterovibrio norvegicus 10N.261.45.A10
agatcaggaagttagcaaccaacacttggaact

SEQ ID NO: 1329 - DNA, 34 bp, Enterovibrio norvegicus
  Enterovibrio norvegicus 10N.261.45.A10
agcgacacccccaaaatttttgacttgtgaagac

SEQ ID NO: 1330 - DNA, 28 bp, Photobacterium kishitanii
  Photobacterium kishitanii DSMZ 2167
gtgaacagccgcataggcagctaagaaa

SEQ ID NO: 1331 - DNA, 28 bp, Photobacterium kishitanii
  Photobacterium kishitanii DSMZ 2167
tagaacagtcgaatagactgctaagaaa

SEQ ID NO: 1332 - DNA, 28 bp, Photobacterium kishitanii
  Photobacterium kishitanii DSMZ 2167
ataaacagctgaacaagcagatagtagt

SEQ ID NO: 1333 - DNA, 32 bp, Photobacterium kishitanii
  Photobacterium kishitanii DSMZ 2167
ccacagccagcgtttagctgttgcccctttcg

SEQ ID NO: 1334 - DNA, 32 bp, Photobacterium kishitanii
  Photobacterium kishitanii DSMZ 2167
cgtcacatacctgatattaaagcagggctgat

SEQ ID NO: 1335 - DNA, 32 bp, Photobacterium kishitanii
  Photobacterium kishitanii DSMZ 2167
tgctctaaagcttctttaacttggctatacgt

SEQ ID NO: 1336 - DNA, 33 bp, Photobacterium kishitanii; identical to SEQ ID NO: 552
  Photobacterium kishitanii DSMZ 2167

SEQ ID NO: 1337 - DNA, 21 bp, Photobacterium kishitanii
  Photobacterium kishitanii DSMZ 2167
aggcttggaagagagcgacca

SEQ ID NO: 1338 - DNA, 21 bp, Photobacterium kishitanii
  Photobacterium kishitanii DSMZ 2167
aggcccggaagggagcaaccg

SEQ ID NO: 1339 - DNA, 28 bp, Photobacterium kishitanii
  Photobacterium kishitanii calba.1.1
gtgaacagccgcgtaggccgctaagaaa

SEQ ID NO: 1340 - DNA, 28 bp, Photobacterium kishitanii
  Photobacterium kishitanii calba.1.1
gtaaacagccgtgtaggcagctaagaaa

SEQ ID NO: 1341 - DNA, 28 bp, Photobacterium kishitanii
  Photobacterium kishitanii calba.1.1
gtgaacagccggataggcagctaagaaa

SEQ ID NO: 1342 - DNA, 28 bp, Photobacterium kishitanii
  Photobacterium kishitanii calba.1.1
gtgaacagccgcgtaggcagctaagaaa

SEQ ID NO: 1343 - DNA, 32 bp, Photobacterium kishitanii; identical to SEQ ID NO: 1298
  Photobacterium kishitanii calba.1.1

SEQ ID NO: 1344 - DNA, 32 bp, Photobacterium kishitanii; identical to SEQ ID NO: 1299
  Photobacterium kishitanii calba.1.1

SEQ ID NO: 1345 - DNA, 32 bp, Photobacterium kishitanii; identical to SEQ ID NO: 1300
  Photobacterium kishitanii calba.1.1

SEQ ID NO: 1346 - DNA, 32 bp, Photobacterium kishitanii; identical to SEQ ID NO: 1301
  Photobacterium kishitanii calba.1.1

SEQ ID NO: 1347 - DNA, 32 bp, Photobacterium kishitanii; identical to SEQ ID NO: 1302
  Photobacterium kishitanii calba.1.1

SEQ ID NO: 1348 - DNA, 28 bp, Vibrio splendidus
  Vibrio splendidus ZS_185
gtgtcctgccgaataggcagctaagaaa

SEQ ID NO: 1349 - DNA, 28 bp, Vibrio splendidus
  Vibrio splendidus ZS_185
gtgtcctgccgaataggcagctaagaat

SEQ ID NO: 1350 - DNA, 28 bp, Vibrio splendidus
  Vibrio splendidus ZS_185
ccttcctgctgaacaagcagttaataat

SEQ ID NO: 1351 - DNA, 32 bp, Vibrio splendidus
  Vibrio splendidus ZS_185
caccgaatttgtggataagttttaatcaatat

SEQ ID NO: 1352 - DNA, 18 bp, Vibrio splendidus
  Vibrio splendidus ZS_185
aggccaggaagaaagcaa

SEQ ID NO: 1353 - DNA, 18 bp, Vibrio splendidus
  Vibrio splendidus ZS_185
aggcctggaagggagcag

SEQ ID NO: 1354 - DNA, 28 bp, Vibrio breoganii
  Vibrio breoganii 10N.222.46.E5
gtgtcctgccgcataggcagctaagaaa

SEQ ID NO: 1355 - DNA, 28 bp, Vibrio breoganii
  Vibrio breoganii 10N.222.46.E5
gtgtcctgccgcataggcagctaagaat

SEQ ID NO: 1356 - DNA, 28 bp, Vibrio breoganii
  Vibrio breoganii 10N.222.46.E5
ccatcctgctgaacaagcagttaataat

SEQ ID NO: 1357 - DNA, 32 bp, Vibrio breoganii
  Vibrio breoganii 10N.222.46.E5
aaacattgcgccggtgatcgattcagacaagc

SEQ ID NO: 1358 - DNA, 18 bp, Vibrio breoganii
  Vibrio breoganii 10N.222.46.E5
aggtctggaagaaagcaa

SEQ ID NO: 1359 - DNA, 18 bp, Vibrio breoganii
  Vibrio breoganii 10N.222.46.E5
agatccggaaggaagcag

SEQ ID NO: 1360 - DNA, 28 bp, Pseudoalteromonas sp.
  Pseudoalteromonas sp. S4498
gtgacctgccgcataggcagctggaaat

SEQ ID NO: 1361 - DNA, 28 bp, Pseudoalteromonas sp.
  Pseudoalteromonas sp. S4498
gtgacctgccgcataggcagctgaaatt

SEQ ID NO: 1362 - DNA, 28 bp, Pseudoalteromonas sp.
  Pseudoalteromonas sp. S4498
tacacctgccgaaaaggcagaggccaat

SEQ ID NO: 1363 - DNA, 32 bp, Pseudoalteromonas sp.
  Pseudoalteromonas sp. S4498
tggtatcgatgtaaatctgtgtgcatgaaaat

SEQ ID NO: 1364 - DNA, 33 bp, Pseudoalteromonas sp.
  Pseudoalteromonas sp. S4498
aggcctggaagtaaacaaccacatcgtatgaca

SEQ ID NO: 1365 - DNA, 33 bp, Pseudoalteromonas sp.; identical to SEQ ID NO: 1070
  Pseudoalteromonas sp. S4498

SEQ ID NO: 1366 - DNA, 28 bp, Vibrio crassostreae
  Vibrio crassostreae J5-15
gtgtcctgccgcataggcagctaagaaa

SEQ ID NO: 1367 - DNA, 28 bp, Vibrio crassostreae
  Vibrio crassostreae J5-15
gtgtcctgccgcataggcagctaagaat

SEQ ID NO: 1368 - DNA, 28 bp, Vibrio crassostreae
  Vibrio crassostreae J5-15
ccaacctgctgaacaagcagttaagaat

SEQ ID NO: 1369 - DNA, 32 bp, Vibrio crassostreae; identical to SEQ ID NO: 1096
  Vibrio crassostreae J5-15

SEQ ID NO: 1370 - DNA, 18 bp, Vibrio crassostreae
  Vibrio crassostreae J5-15
aggccaggaagaaagcaa

SEQ ID NO: 1371 - DNA, 18 bp, Vibrio crassostreae
  Vibrio crassostreae J5-15
aggcctggaagggagcag

SEQ ID NO: 1372 - DNA, 28 bp, Photobacterium leiognathi
  Photobacterium leiognathi Res.4.1
gtgaacagccgtataggcagctaagaat

SEQ ID NO: 1373 - DNA, 28 bp, Photobacterium leiognathi
  Photobacterium leiognathi Res.4.1
gtgaacagccgtataggccgctaagaaa

SEQ ID NO: 1374 - DNA, 28 bp, Photobacterium leiognathi
  Photobacterium leiognathi Res.4.1
gtgagtagccgtataggctgttaataga

SEQ ID NO: 1375 - DNA, 28 bp, Photobacterium leiognathi
  Photobacterium leiognathi Res.4.1
atattcagccgaaaaggccgttgagttt

SEQ ID NO: 1376 - DNA, 28 bp, Photobacterium leiognathi
  Photobacterium leiognathi Res.4.1
gagaacagctgtataggcagttaataga

SEQ ID NO: 1377 - DNA, 31 bp, Photobacterium leiognathi
  Photobacterium leiognathi Res.4.1
tgaaaaacggtttattcaatgtcgatggtgt

SEQ ID NO: 1378 - DNA, 31 bp, Photobacterium leiognathi; identical to SEQ ID NO: 599
  Photobacterium leiognathi Res.4.1

SEQ ID NO: 1379 - DNA, 31 bp, Photobacterium leiognathi
  Photobacterium leiognathi Res.4.1
cggcaatatcttagcttggaacactaagtat

SEQ ID NO: 1380 - DNA, 32 bp, Photobacterium leiognathi
  Photobacterium leiognathi Res.4.1
cgggcaatatcttagcttggaacactgagtat

SEQ ID NO: 1381 - DNA, 32 bp, Photobacterium leiognathi
  Photobacterium leiognathi Res.4.1
cgggcaatatctcggcttggaacactgagata

SEQ ID NO: 1382 - DNA, 28 bp, Vibrio cholerae
  Vibrio cholerae YB4G06
ttgccctgccgcataggcagccaagaaa

SEQ ID NO: 1383 - DNA, 28 bp, Vibrio cholerae
  Vibrio cholerae YB4G06
gtgacctgccgtataggtagccaaaaat

SEQ ID NO: 1384 - DNA, 28 bp, Vibrio cholerae
  Vibrio cholerae YB4G06
cctacctgctgaacaagcagttaataat

SEQ ID NO: 1385 - DNA, 32 bp, Vibrio cholerae; identical to SEQ ID NO: 242
  Vibrio cholerae YB4G06

SEQ ID NO: 1386 - DNA, 18 bp, Vibrio cholerae
  Vibrio cholerae YB4G06
aggtcaggaagaaagcaa

SEQ ID NO: 1387 - DNA, 18 bp, Vibrio cholerae
  Vibrio cholerae YB4G06
agatccggaaggaagcag

SEQ ID NO: 1388 - DNA, 28 bp, Vibrio lentus
  Vibrio lentus 10N.261.45.C3
gtgtcctgccgcataggcagctaagaaa

SEQ ID NO: 1389 - DNA, 28 bp, Vibrio lentus
  Vibrio lentus 10N.261.45.C3
gtgtcctgccgcataggcagctaagaat

SEQ ID NO: 1390 - DNA, 28 bp, Vibrio lentus
  Vibrio lentus 10N.261.45.C3
ccttcctgctgaacaagcagttaataat

SEQ ID NO: 1391 - DNA, 32 bp, Vibrio lentus; identical to SEQ ID NO: 338
  Vibrio lentus 10N.261.45.C3

SEQ ID NO: 1392 - DNA, 18 bp, Vibrio lentus
  Vibrio lentus 10N.261.45.C3
aggccaggaagaaagcaa

SEQ ID NO: 1393 - DNA, 18 bp, Vibrio lentus
  Vibrio lentus 10N.261.45.C3
aggcctggaagggagcag

SEQ ID NO: 1394 - DNA, 28 bp, Pseudoalteromonas sp.
  Pseudoalteromonas sp. S4389
gtgacctgccgcataggcagctggaaga

SEQ ID NO: 1395 - DNA, 28 bp, Pseudoalteromonas sp.
  Pseudoalteromonas sp. S4389
gtgacctgccgcataggcagctggaaat

SEQ ID NO: 1396 - DNA, 28 bp, Pseudoalteromonas sp.
  Pseudoalteromonas sp. S4389
gtaatctgctgcataggtagctgaaatt

SEQ ID NO: 1397 - DNA, 28 bp, Pseudoalteromonas sp.
  Pseudoalteromonas sp. S4389
tattactgccgaaaaggcagaggccaat

SEQ ID NO: 1398 - DNA, 32 bp, Pseudoalteromonas sp.
  Pseudoalteromonas sp. S4389
atcagaatggctacgtgaagcgatggctgcaa

SEQ ID NO: 1399 - DNA, 30 bp, Pseudoalteromonas sp.
  Pseudoalteromonas sp. S4389
atcaactattggacaccgattattttgatc

SEQ ID NO: 1400 - DNA, 33 bp, Pseudoalteromonas sp.
  Pseudoalteromonas sp. S4389
aggccaggaagtaaacaaccacatcatatgaca

SEQ ID NO: 1401 - DNA, 33 bp, Pseudoalteromonas sp.; identical to SEQ ID NO: 188
  Pseudoalteromonas sp. S4389

SEQ ID NO: 1402 - DNA, 28 bp, Photobacterium sp.
  Photobacterium sp. BEI 247
gtgacctgccgcataggtagctgagaaa

SEQ ID NO: 1403 - DNA, 28 bp, Photobacterium sp.
  Photobacterium sp. BEI 247
gtgacctgccgtataggcagttgagata

SEQ ID NO: 1404 - DNA, 28 bp, Photobacterium sp.
  Photobacterium sp. BEI 247
tagacctgccgaaaaggtagtatataat

SEQ ID NO: 1405 - DNA, 32 bp, Photobacterium sp.
  Photobacterium sp. BEI 247
ttatgctgcggaagagctgacttcaacattaa

SEQ ID NO: 1406 - DNA, 34 bp, Photobacterium sp.
  Photobacterium sp. BEI 247
aggccaagaagtgaacatccgtaacaggcaaaat

SEQ ID NO: 1407 - DNA, 34 bp, Photobacterium sp.
  Photobacterium sp. BEI 247
aggcccggaagggagcaaccgcagcgggtgacgt

SEQ ID NO: 1408 - DNA, 28 bp, Enterovibrio sp.
  Enterovibrio sp. CAIM 600
gtgaaccgccgtataggcagctaggaat

SEQ ID NO: 1409 - DNA, 28 bp, Enterovibrio sp.
  Enterovibrio sp. CAIM 600
gtgaaccgccgtataggcagcttgtaaa

SEQ ID NO: 1410 - DNA, 28 bp, Enterovibrio sp.
  Enterovibrio sp. CAIM 600
gagaaccgccgaaaaggcagctaggaat

SEQ ID NO: 1411 - DNA, 28 bp, Enterovibrio sp.
  Enterovibrio sp. CAIM 600
cggaaccgccgaaaaggcagagaaacaa

SEQ ID NO: 1412 - DNA, 32 bp, Enterovibrio sp.
  Enterovibrio sp. CAIM 600
ttgaaggtttggataattagggtcaggacaat

SEQ ID NO: 1413 - DNA, 32 bp, Enterovibrio sp.
  Enterovibrio sp. CAIM 600
agctcacactctagaagcaaaagagatggcac

SEQ ID NO: 1414 - DNA, 32 bp, Enterovibrio sp.
  Enterovibrio sp. CAIM 600
aatattgacaatgagatgttatgcagagtcat

SEQ ID NO: 1415 - DNA, 33 bp, Enterovibrio sp.
  Enterovibrio sp. CAIM 600
ctcttgaggaatgttaattcagcattagtatca

SEQ ID NO: 1416 - DNA, 32 bp, Enterovibrio sp.
  Enterovibrio sp. CAIM 600
aaggtccgccgtgaaataagccgtcaaattaa

SEQ ID NO: 1417 - DNA, 32 bp, Enterovibrio sp.
  Enterovibrio sp. CAIM 600
aaagttcgtcgtgaaataagccgccaaatcaa

SEQ ID NO: 1418 - DNA, 28 bp, Vibrio parahaemolyticus
  Vibrio parahaemolyticus CDC-AM50933
ggtatctgccgcataggcagtcaagaaa

SEQ ID NO: 1419 - DNA, 28 bp, Vibrio parahaemolyticus
  Vibrio parahaemolyticus CDC-AM50933
gtgatctgccgcataggcagctaagaat

SEQ ID NO: 1420 - DNA, 28 bp, Vibrio parahaemolyticus
  Vibrio parahaemolyticus CDC-AM50933
cctacctgctgaacaagcagtttttatt

SEQ ID NO: 1421 - DNA, 32 bp, Vibrio parahaemolyticus; identical to SEQ ID NO: 82
  Vibrio parahaemolyticus CDC-AM50933

SEQ ID NO: 1422 - DNA, 18 bp, Vibrio parahaemolyticus
  Vibrio parahaemolyticus CDC-AM50933
aggtctggaagaaaacaa

SEQ ID NO: 1423 - DNA, 18 bp, Vibrio parahaemolyticus
  Vibrio parahaemolyticus CDC-AM50933
aggtccggaaggaagcag

SEQ ID NO: 1424 - DNA, 28 bp, Shewanella putrefaciens
  Shewanella putrefaciens NCTC10695
gtttactgccgaataggcagctgaaaaa

SEQ ID NO: 1425 - DNA, 28 bp, Shewanella putrefaciens
  Shewanella putrefaciens NCTC10695
gttaactgccgcaaaggcagatatgtta

SEQ ID NO: 1426 - DNA, 28 bp, Shewanella putrefaciens
  Shewanella putrefaciens NCTC10695
atagactgccgaaaaggcagttgaaaat

SEQ ID NO: 1427 - DNA, 28 bp, Shewanella putrefaciens
  Shewanella putrefaciens NCTC10695
gtctactgccgcagaggcagattaagcc

SEQ ID NO: 1428 - DNA, 32 bp, Shewanella putrefaciens
  Shewanella putrefaciens NCTC10695
ttcagcaatgtttcaatgcatctagctctaac

SEQ ID NO: 1429 - DNA, 32 bp, Shewanella putrefaciens
  Shewanella putrefaciens NCTC10695
aaaaacaatcgtttcgatgtttaagttaattc

SEQ ID NO: 1430 - DNA, 32 bp, Shewanella putrefaciens
  Shewanella putrefaciens NCTC10695
aaaaaaaatcgcttcgatgtttatgtaaaagc

SEQ ID NO: 1431 - DNA, 28 bp, Vibrio azureus
  Vibrio azureus NBRC 104587
ctgtactgccgcataggtagctaagaaa

SEQ ID NO: 1432 - DNA, 28 bp, Vibrio azureus
  Vibrio azureus NBRC 104587
ctgtactgccgcataggtagttaagagt

SEQ ID NO: 1433 - DNA, 28 bp, Vibrio azureus
  Vibrio azureus NBRC 104587
aaagactgccgaaaaggtagtttatacg

SEQ ID NO: 1434 - DNA, 32 bp, Vibrio azureus; identical to SEQ ID NO: 522
  Vibrio azureus NBRC 104587

SEQ ID NO: 1435 - DNA, 32 bp, Vibrio azureus; identical to SEQ ID NO: 523
  Vibrio azureus NBRC 104587

SEQ ID NO: 1436 - DNA, 32 bp, Vibrio azureus; identical to SEQ ID NO: 524
  Vibrio azureus NBRC 104587

SEQ ID NO: 1437 - DNA, 32 bp, Vibrio azureus; identical to SEQ ID NO: 525
  Vibrio azureus NBRC 104587

SEQ ID NO: 1438 - DNA, 28 bp, Vibrio parahaemolyticus
  Vibrio parahaemolyticus A4EZ703
gtcacctgtcgcatagacagccaagaat

SEQ ID NO: 1439 - DNA, 28 bp, Vibrio parahaemolyticus
  Vibrio parahaemolyticus A4EZ703
gtgacctgccgcataggcagccaagaat

SEQ ID NO: 1440 - DNA, 28 bp, Vibrio parahaemolyticus
  Vibrio parahaemolyticus A4EZ703
cctacctgttgaacaagcagttaataat

SEQ ID NO: 1441 - DNA, 31 bp, Vibrio parahaemolyticus; identical to SEQ ID NO: 44
  Vibrio parahaemolyticus A4EZ703

SEQ ID NO: 1442 - DNA, 18 bp, Vibrio parahaemolyticus
  Vibrio parahaemolyticus A4EZ703
aggtcaggaagaaagcaa

SEQ ID NO: 1443 - DNA, 18 bp, Vibrio parahaemolyticus
  Vibrio parahaemolyticus A4EZ703
aggtccggaaggaagcag

SEQ ID NO: 1444 - DNA, 28 bp, Photobacterium proteolyticum
  Photobacterium proteolyticum 13-12
gtaacctgccgcataggcagctgagaaa

SEQ ID NO: 1445 - DNA, 28 bp, Photobacterium proteolyticum
  Photobacterium proteolyticum 13-12
gtgacctgccgtataggcagttgagata

SEQ ID NO: 1446 - DNA, 28 bp, Photobacterium proteolyticum
  Photobacterium proteolyticum 13-12
tagacctgccgaaaaggtagtatataat

SEQ ID NO: 1447 - DNA, 32 bp, Photobacterium proteolyticum
  Photobacterium proteolyticum 13-12
agtgtggacggtgggatagggacatcacgcac

SEQ ID NO: 1448 - DNA, 34 bp, Photobacterium proteolyticum; identical to SEQ ID NO: 1406
  Photobacterium proteolyticum 13-12

SEQ ID NO: 1449 - DNA, 34 bp, Photobacterium proteolyticum
  Photobacterium proteolyticum 13-12
aggcccggaagggagcaaccgcagcaggcgacgt

SEQ ID NO: 1450 - DNA, 28 bp, Vibrio cholerae
  Vibrio cholerae OYP1G01
gtgttctgtcgaataggcagccaagaaa

SEQ ID NO: 1451 - DNA, 28 bp, Vibrio cholerae
  Vibrio cholerae OYP1G01
gtgttctgccgaataggcagccaagaat

SEQ ID NO: 1452 - DNA, 28 bp, Vibrio cholerae
  Vibrio cholerae OYP1G01
cctacctgctgaacaagcagttaataat

SEQ ID NO: 1453 - DNA, 32 bp, Vibrio cholerae
  Vibrio cholerae OYP1G01
tttagaacttctggcactgtcacaggttttgt

SEQ ID NO: 1454 - DNA, 32 bp, Vibrio cholerae
  Vibrio cholerae OYP1G01
tattaagccgctggtcgatttgggtgaatggc

SEQ ID NO: 1455 - DNA, 32 bp, Vibrio cholerae
  Vibrio cholerae OYP1G01
gtcataactgcgaactacttccccatttttcc

SEQ ID NO: 1456 - DNA, 18 bp, Vibrio cholerae
  Vibrio cholerae OYP1G01
aggtcaggaagaaagcaa

SEQ ID NO: 1457 - DNA, 18 bp, Vibrio cholerae
  Vibrio cholerae OYP1G01
agatccggaaggaagcag

SEQ ID NO: 1458 - DNA, 28 bp, Pseudoalteromonas sp.
  Pseudoalteromonas sp. SW0106-04
gtgaattgccgagtaggcagctgaaaat

SEQ ID NO: 1459 - DNA, 28 bp, Pseudoalteromonas sp.
  Pseudoalteromonas sp. SW0106-04
gtgaactgccgagtaggcagctggaaat

SEQ ID NO: 1460 - DNA, 28 bp, Pseudoalteromonas sp.
  Pseudoalteromonas sp. SW0106-04
gtgaactgccgagtaggcagctgaaatt

SEQ ID NO: 1461 - DNA, 28 bp, Pseudoalteromonas sp.
  Pseudoalteromonas sp. SW0106-04
tttaactgccgaaaaggcagggctcact

SEQ ID NO: 1462 - DNA, 28 bp, Pseudoalteromonas sp.
  Pseudoalteromonas sp. SW0106-04
tttaactgccgaaaaggcagggctagac

SEQ ID NO: 1463 - DNA, 32 bp, Pseudoalteromonas sp.
  Pseudoalteromonas sp. SW0106-04
acactttcacagtttgtgaagtggaaatagaa

SEQ ID NO: 1464 - DNA, 32 bp, Pseudoalteromonas sp.
  Pseudoalteromonas sp. SW0106-04
aatagcatttccaccgtaaacggcgctgtaaa

SEQ ID NO: 1465 - DNA, 33 bp, Pseudoalteromonas sp.
  Pseudoalteromonas sp. SW0106-04
aggccaagaagtaatcaatcacatcatgttact

SEQ ID NO: 1466 - DNA, 33 bp, Pseudoalteromonas sp.; identical to SEQ ID NO: 187
  Pseudoalteromonas sp. SW0106-04

SEQ ID NO: 1467 - DNA, 33 bp, Pseudoalteromonas sp.; identical to SEQ ID NO: 188
  Pseudoalteromonas sp. SW0106-04

SEQ ID NO: 1468 - DNA, 28 bp, Parashewanella spongiae
  Parashewanella spongiae KCTC 22492
gtgctccgccgaataggcagctaaaaag

SEQ ID NO: 1469 - DNA, 28 bp, Parashewanella spongiae
  Parashewanella spongiae KCTC 22492
gtgctccgccgaataggcagctttaaaa

SEQ ID NO: 1470 - DNA, 28 bp, Parashewanella spongiae
  Parashewanella spongiae KCTC 22492
aggaactgccgaacaggtagctaaaaaa

SEQ ID NO: 1471 - DNA, 28 bp, Parashewanella spongiae
  Parashewanella spongiae KCTC 22492
gccttctgccgaacaggtagactaaagg

SEQ ID NO: 1472 - DNA, 32 bp, Parashewanella spongiae
  Parashewanella spongiae KCTC 22492
aaattagaagacatcactttttttttcttact

SEQ ID NO: 1473 - DNA, 32 bp, Parashewanella spongiae
  Parashewanella spongiae KCTC 22492
ggttacacttgcgcccgttacaaaattatcgg

SEQ ID NO: 1474 - DNA, 32 bp, Parashewanella spongiae
  Parashewanella spongiae KCTC 22492
aaatacgacacaccaccatcttgcagagtcga

SEQ ID NO: 1475 - DNA, 30 bp, Parashewanella spongiae
  Parashewanella spongiae KCTC 22492
agaccaggaagtaagcagccacaacaggta

SEQ ID NO: 1476 - DNA, 30 bp, Parashewanella spongiae
  Parashewanella spongiae KCTC 22492
agatccggaaggaagcaaccgcagcgaatg

SEQ ID NO: 1477 - DNA, 28 bp, Photobacterium angustum
  Photobacterium angustum S14
gtgaaccgccgtataggcagctgagaaa

SEQ ID NO: 1478 - DNA, 28 bp, Photobacterium angustum
  Photobacterium angustum S14
gtgaaccgccgtataggcagctgagatt

SEQ ID NO: 1479 - DNA, 28 bp, Photobacterium angustum
  Photobacterium angustum S14
taaatccgccgaagaggcagagatgtga

SEQ ID NO: 1480 - DNA, 32 bp, Photobacterium angustum
  Photobacterium angustum S14
aagcatgcgaaaagtcggttatctggctattt

SEQ ID NO: 1481 - DNA, 32 bp, Photobacterium angustum
  Photobacterium angustum S14
gcaaaggtcattctattattgcttctgattgt

SEQ ID NO: 1482 - DNA, 34 bp, Photobacterium angustum
  Photobacterium angustum S14
aggccaagaagatagcaacgacatcaggcaatat

SEQ ID NO: 1483 - DNA, 34 bp, Photobacterium angustum
  Photobacterium angustum S14
aggctcggaagggagcaaccgcagcaggcgatgt

SEQ ID NO: 1484 - DNA, 28 bp, Vibrio breoganii
  Vibrio breoganii ZF-29
gtatcctgccgcataggcagctaagaaa

SEQ ID NO: 1485 - DNA, 28 bp, Vibrio breoganii
  Vibrio breoganii ZF-29
gtgtcctgccgcataggcagctaagaat

SEQ ID NO: 1486 - DNA, 28 bp, Vibrio breoganii
  Vibrio breoganii ZF-29
ccatcctgctgaacaagcagttaataat

SEQ ID NO: 1487 - DNA, 32 bp, Vibrio breoganii
  Vibrio breoganii ZF-29
accactctaccaccagcattgacaaggcttaa

SEQ ID NO: 1488 - DNA, 18 bp, Vibrio breoganii
  Vibrio breoganii ZF-29
agctctggaagaaagcaa

SEQ ID NO: 1489 - DNA, 18 bp, Vibrio breoganii
  Vibrio breoganii ZF-29
agatccggaaggaagcag

SEQ ID NO: 1490 - DNA, 28 bp, Vibrio cholerae
  Vibrio cholerae 09_113
gtgttctgccgaataggcagccaagaaa

SEQ ID NO: 1491 - DNA, 28 bp, Vibrio cholerae
  Vibrio cholerae 09_113
gtgttctgccgaataggcagccaagaat

SEQ ID NO: 1492 - DNA, 28 bp, Vibrio cholerae
  Vibrio cholerae 09_113
cctacctgctgaacaagcagttaataat

SEQ ID NO: 1493 - DNA, 32 bp, Vibrio cholerae
  Vibrio cholerae 09_113
gctcaagaaaaaagagcgcgagcaagtccgtg

SEQ ID NO: 1494 - DNA, 32 bp, Vibrio cholerae
  Vibrio cholerae 09_113
tttcagcaacggctgatttaatgaacaaaaag

SEQ ID NO: 1495 - DNA, 18 bp, Vibrio cholerae
  Vibrio cholerae 09_113
aggtcaggaagaaagcaa

SEQ ID NO: 1496 - DNA, 18 bp, Vibrio cholerae
  Vibrio cholerae 09_113
agatccggaagggagcag

SEQ ID NO: 1497 - DNA, 28 bp, Pseudoalteromonas sp.
  Pseudoalteromonas sp. SCSIO_11900
gtgaactgccgagtaggcagctggaaat

SEQ ID NO: 1498 - DNA, 28 bp, Pseudoalteromonas sp.
  Pseudoalteromonas sp. SCSIO_11900
gtgaactgccgagtaggcagctgaagtt

SEQ ID NO: 1499 - DNA, 28 bp, Pseudoalteromonas sp.
  Pseudoalteromonas sp. SCSIO_11900
tttaactgccgaaaaggcagagggtaaa

SEQ ID NO: 1500 - DNA, 32 bp, Pseudoalteromonas sp.; identical to SEQ ID NO: 283
  Pseudoalteromonas sp. SCSIO_11900

SEQ ID NO: 1501 - DNA, 32 bp, Pseudoalteromonas sp.
  Pseudoalteromonas sp. SCSIO_11900
gtcattagggggttatctagggttaggctttt

SEQ ID NO: 1502 - DNA, 32 bp, Pseudoalteromonas sp.; identical to SEQ ID NO: 284
  Pseudoalteromonas sp. SCSIO_11900

SEQ ID NO: 1503 - DNA, 33 bp, Pseudoalteromonas sp.; identical to SEQ ID NO: 285
  Pseudoalteromonas sp. SCSIO_11900

SEQ ID NO: 1504 - DNA, 33 bp, Pseudoalteromonas sp.; identical to SEQ ID NO: 20
  Pseudoalteromonas sp. SCSIO_11900

SEQ ID NO: 1505 - DNA, 28 bp, Aliivibrio fischeri
  Aliivibrio fischeri MJ11
gtaacctgctgaataggcagccaagaat

SEQ ID NO: 1506 - DNA, 28 bp, Aliivibrio fischeri
  Aliivibrio fischeri MJ11
gtaacctgccgaataggcagccaaaaat

SEQ ID NO: 1507 - DNA, 31 bp, Aliivibrio fischeri
  Aliivibrio fischeri MJ11
ttatagagaaattcagcattcgcatgaaggt

SEQ ID NO: 1508 - DNA, 28 bp, Unknown
  Description of Unknown: Vibrionales bacterium sequence
  Vibrionales bacterium SWAT-3
gtgtcctgccgcataggcagctaagaaa

SEQ ID NO: 1509 - DNA, 28 bp, Unknown
  Description of Unknown: Vibrionales bacterium sequence
  Vibrionales bacterium SWAT-3
gtgtcctgccgcataggtagctaagaat

SEQ ID NO: 1510 - DNA, 28 bp, Unknown
  Description of Unknown: Vibrionales bacterium sequence
  Vibrionales bacterium SWAT-3
ccttcctgctgaacaagcagttaataat

SEQ ID NO: 1511 - DNA, 32 bp, Unknown
  Description of Unknown: Vibrionales bacterium sequence
  Vibrionales bacterium SWAT-3
attaaatttaatttcaattccaatgaatctat

SEQ ID NO: 1512 - DNA, 18 bp, Unknown
  Description of Unknown: Vibrionales bacterium sequence
  Vibrionales bacterium SWAT-3
aggccaggaagaaagcaa

SEQ ID NO: 1513 - DNA, 18 bp, Unknown
  Description of Unknown: Vibrionales bacterium sequence
  Vibrionales bacterium SWAT-3
aggtccggaaggaagcag

SEQ ID NO: 1514 - DNA, 28 bp, Pseudoalteromonas sp.
  Pseudoalteromonas sp. BSi20495
gtgaactgccgagtaggcagctggagat

SEQ ID NO: 1515 - DNA, 28 bp, Pseudoalteromonas sp.
  Pseudoalteromonas sp. BSi20495
gtgaactgccgagtaggcagctgaaatt

SEQ ID NO: 1516 - DNA, 28 bp, Pseudoalteromonas sp.
  Pseudoalteromonas sp. BSi20495
tttaactgccgaaaaggcagaggctaaa

SEQ ID NO: 1517 - DNA, 32 bp, Pseudoalteromonas sp.
  Pseudoalteromonas sp. BSi20495
taacagatgacgtggcattctttgaaaaattc

SEQ ID NO: 1518 - DNA, 32 bp, Pseudoalteromonas sp.
  Pseudoalteromonas sp. BSi20495
agttggtaattatagaacagcatggatcatga

SEQ ID NO: 1519 - DNA, 33 bp, Pseudoalteromonas sp.; identical to SEQ ID NO: 656
  Pseudoalteromonas sp. BSi20495

SEQ ID NO: 1520 - DNA, 33 bp, Pseudoalteromonas sp.; identical to SEQ ID NO: 20
  Pseudoalteromonas sp. BSi20495

SEQ ID NO: 1521 - DNA, 28 bp, Vibrio parahaemolyticus
  Vibrio parahaemolyticus CFSAN007436
gtgtcctgccgtgtaggcagctaagaaa

SEQ ID NO: 1522 - DNA, 28 bp, Vibrio parahaemolyticus
  Vibrio parahaemolyticus CFSAN007436
gtgtcctgccgcataggcagccaataat

SEQ ID NO: 1523 - DNA, 28 bp, Vibrio parahaemolyticus
  Vibrio parahaemolyticus CFSAN007436
gtgacctgccgtataggcagccaagaat

SEQ ID NO: 1524 - DNA, 28 bp, Vibrio parahaemolyticus
  Vibrio parahaemolyticus CFSAN007436
cctacctgctgaacaagcagttaataat

SEQ ID NO: 1525 - DNA, 32 bp, Vibrio parahaemolyticus; identical to SEQ ID NO: 31
  Vibrio parahaemolyticus CFSAN007436

SEQ ID NO: 1526 - DNA, 32 bp, Vibrio parahaemolyticus; identical to SEQ ID NO: 32
  Vibrio parahaemolyticus CFSAN007436

SEQ ID NO: 1527 - DNA, 18 bp, Vibrio parahaemolyticus
  Vibrio parahaemolyticus CFSAN007436
aggtcaggaagaaagcaa

SEQ ID NO: 1528 - DNA, 18 bp, Vibrio parahaemolyticus
  Vibrio parahaemolyticus CFSAN007436
aggtccggaaggaagcag

SEQ ID NO: 1529 - DNA, 28 bp, Vibrio parahaemolyticus
  Vibrio parahaemolyticus CFSAN007431
gtgtcctgccgtgtaggcagctaagaaa

SEQ ID NO: 1530 - DNA, 28 bp, Vibrio parahaemolyticus
  Vibrio parahaemolyticus CFSAN007431
gtgtcctgccgcataggcagccaataat

SEQ ID NO: 1531 - DNA, 28 bp, Vibrio parahaemolyticus
  Vibrio parahaemolyticus CFSAN007431
gtgacctgccgtataggcagccaagaat

SEQ ID NO: 1532 - DNA, 28 bp, Vibrio parahaemolyticus
  Vibrio parahaemolyticus CFSAN007431
cctacctgctgaacaagcagttaataat

SEQ ID NO: 1533 - DNA, 32 bp, Vibrio parahaemolyticus; identical to SEQ ID NO: 31
  Vibrio parahaemolyticus CFSAN007431

SEQ ID NO: 1534 - DNA, 32 bp, Vibrio parahaemolyticus; identical to SEQ ID NO: 32
  Vibrio parahaemolyticus CFSAN007431

SEQ ID NO: 1535 - DNA, 18 bp, Vibrio parahaemolyticus
  Vibrio parahaemolyticus CFSAN007431
aggtcaggaagaaagcaa

SEQ ID NO: 1536 - DNA, 18 bp, Vibrio parahaemolyticus
  Vibrio parahaemolyticus CFSAN007431
aggtccggaaggaagcag

SEQ ID NO: 1537 - DNA, 28 bp, Vibrio parahaemolyticus
  Vibrio parahaemolyticus CFSAN007430
gtgtcctgccgtgtaggcagctaagaaa

SEQ ID NO: 1538 - DNA, 28 bp, Vibrio parahaemolyticus
  Vibrio parahaemolyticus CFSAN007430
gtgtcctgccgcataggcagccaataat

SEQ ID NO: 1539 - DNA, 28 bp, Vibrio parahaemolyticus
  Vibrio parahaemolyticus CFSAN007430
gtgacctgccgtataggcagccaagaat

SEQ ID NO: 1540 - DNA, 28 bp, Vibrio parahaemolyticus
  Vibrio parahaemolyticus CFSAN007430
cctacctgctgaacaagcagttaataat

SEQ ID NO: 1541 - DNA, 32 bp, Vibrio parahaemolyticus; identical to SEQ ID NO: 31
  Vibrio parahaemolyticus CFSAN007430

SEQ ID NO: 1542 - DNA, 32 bp, Vibrio parahaemolyticus; identical to SEQ ID NO: 32
  Vibrio parahaemolyticus CFSAN007430

SEQ ID NO: 1543 - DNA, 18 bp, Vibrio parahaemolyticus
  Vibrio parahaemolyticus CFSAN007430
aggtcaggaagaaagcaa

SEQ ID NO: 1544 - DNA, 18 bp, Vibrio parahaemolyticus
  Vibrio parahaemolyticus CFSAN007430
aggtccggaaggaagcag

SEQ ID NO: 1545 - DNA, 28 bp, Vibrio parahaemolyticus
  Vibrio parahaemolyticus CFSAN007433
gtgtcctgccgtgtaggcagctaagaaa

SEQ ID NO: 1546 - DNA, 28 bp, Vibrio parahaemolyticus
  Vibrio parahaemolyticus CFSAN007433
gtgtcctgccgcataggcagccaataat

SEQ ID NO: 1547 - DNA, 28 bp, Vibrio parahaemolyticus
  Vibrio parahaemolyticus CFSAN007433
gtgacctgccgtataggcagccaagaat

SEQ ID NO: 1548 - DNA, 28 bp, Vibrio parahaemolyticus
  Vibrio parahaemolyticus CFSAN007433
cctacctgctgaacaagcagttaataat

SEQ ID NO: 1549 - DNA, 32 bp, Vibrio parahaemolyticus; identical to SEQ ID NO: 31
  Vibrio parahaemolyticus CFSAN007433

SEQ ID NO: 1550 - DNA, 32 bp, Vibrio parahaemolyticus; identical to SEQ ID NO: 32
  Vibrio parahaemolyticus CFSAN007433

SEQ ID NO: 1551 - DNA, 18 bp, Vibrio parahaemolyticus
  Vibrio parahaemolyticus CFSAN007433
aggtcaggaagaaagcaa

SEQ ID NO: 1552 - DNA, 18 bp, Vibrio parahaemolyticus
  Vibrio parahaemolyticus CFSAN007433
aggtccggaaggaagcag

SEQ ID NO: 1553 - DNA, 28 bp, Vibrio parahaemolyticus
  Vibrio parahaemolyticus CFSAN007434
gtgtcctgccgtgtaggcagctaagaaa

SEQ ID NO: 1554 - DNA, 28 bp, Vibrio parahaemolyticus
  Vibrio parahaemolyticus CFSAN007434
gtgtcctgccgcataggcagccaataat

SEQ ID NO: 1555 - DNA, 28 bp, Vibrio parahaemolyticus
  Vibrio parahaemolyticus CFSAN007434
gtgacctgccgtataggcagccaagaat

SEQ ID NO: 1556 - DNA, 28 bp, Vibrio parahaemolyticus
  Vibrio parahaemolyticus CFSAN007434
cctacctgctgaacaagcagttaataat

SEQ ID NO: 1557 - DNA, 32 bp, Vibrio parahaemolyticus; identical to SEQ ID NO: 31
  Vibrio parahaemolyticus CFSAN007434

SEQ ID NO: 1558 - DNA, 32 bp, Vibrio parahaemolyticus; identical to SEQ ID NO: 32
  Vibrio parahaemolyticus CFSAN007434

SEQ ID NO: 1559 - DNA, 18 bp, Vibrio parahaemolyticus
  Vibrio parahaemolyticus CFSAN007434
aggtcaggaagaaagcaa

SEQ ID NO: 1560 - DNA, 18 bp, Vibrio parahaemolyticus
  Vibrio parahaemolyticus CFSAN007434
aggtccggaaggaagcag

SEQ ID NO: 1561 - DNA, 28 bp, Vibrio vulnificus
  Vibrio vulnificus 491771
gtgacctgccgcataggcagccaagaaa

SEQ ID NO: 1562 - DNA, 28 bp, Vibrio vulnificus
  Vibrio vulnificus 491771
gtgacctgccgcataggcagccaagaat

SEQ ID NO: 1563 - DNA, 28 bp, Vibrio vulnificus
  Vibrio vulnificus 491771
cctacctgctgaacaagcagttaataat

SEQ ID NO: 1564 - DNA, 32 bp, Vibrio vulnificus; identical to SEQ ID NO: 38
  Vibrio vulnificus 491771

SEQ ID NO: 1565 - DNA, 18 bp, Vibrio vulnificus
  Vibrio vulnificus 491771
aggttaggaagaaagcaa

SEQ ID NO: 1566 - DNA, 18 bp, Vibrio vulnificus
  Vibrio vulnificus 491771
aggtccggaaggaagcag

SEQ ID NO: 1567 - DNA, 28 bp, Vibrio diabolicus
  Vibrio diabolicus V2
ttgccctgccgcataggcagctaggaat

SEQ ID NO: 1568 - DNA, 28 bp, Vibrio diabolicus
  Vibrio diabolicus V2
gtgccctgccgcataggcagctaagaat

SEQ ID NO: 1569 - DNA, 28 bp, Vibrio diabolicus
  Vibrio diabolicus V2
ccgacctgctgaacaagcagttaataaa

SEQ ID NO: 1570 - DNA, 32 bp, Vibrio diabolicus
  Vibrio diabolicus V2
agtgatatcatactcactggcgttttatgatg

SEQ ID NO: 1571 - DNA, 18 bp, Vibrio diabolicus
  Vibrio diabolicus V2
aggtcaagaagaaagcaa

SEQ ID NO: 1572 - DNA, 18 bp, Vibrio diabolicus
  Vibrio diabolicus V2
aggtccggaaggaagcag

SEQ ID NO: 1573 - DNA, 28 bp, Vibrio sp.
  Vibrio sp. J2-3
gtgtcctgccgcataggcagctaagaaa

SEQ ID NO: 1574 - DNA, 28 bp, Vibrio sp.
  Vibrio sp. J2-3
gtgtcctgccgcataggcagctaagaat

SEQ ID NO: 1575 - DNA, 28 bp, Vibrio sp.
  Vibrio sp. J2-3
cctgcctgctgaacaagcagttaagaat

SEQ ID NO: 1576 - DNA, 32 bp, Vibrio sp.; identical to SEQ ID NO: 62
  Vibrio sp. J2-3

SEQ ID NO: 1577 - DNA, 18 bp, Vibrio sp.
  Vibrio sp. J2-3
aggccaggaagaaagcaa

SEQ ID NO: 1578 - DNA, 18 bp, Vibrio sp.
  Vibrio sp. J2-3
aggcctggaagggagcag

SEQ ID NO: 1579 - DNA, 28 bp, Vibrio parahaemolyticus
  Vibrio parahaemolyticus S487-4
gtgtcctgccgtgtaggcagctaagaaa

SEQ ID NO: 1580 - DNA, 28 bp, Vibrio parahaemolyticus
  Vibrio parahaemolyticus S487-4
gtgtcctgccgcataggcagccaataat

SEQ ID NO: 1581 - DNA, 28 bp, Vibrio parahaemolyticus
  Vibrio parahaemolyticus S487-4
gtgacctgccgtataggcagccaagaat

SEQ ID NO: 1582 - DNA, 28 bp, Vibrio parahaemolyticus
  Vibrio parahaemolyticus S487-4
cctacctgctgaacaagcagttaataat

SEQ ID NO: 1583 - DNA, 32 bp, Vibrio parahaemolyticus; identical to SEQ ID NO: 31
  Vibrio parahaemolyticus S487-4

SEQ ID NO: 1584 - DNA, 32 bp, Vibrio parahaemolyticus; identical to SEQ ID NO: 32
  Vibrio parahaemolyticus S487-4

SEQ ID NO: 1585 - DNA, 18 bp, Vibrio parahaemolyticus
  Vibrio parahaemolyticus S487-4
aggtcaggaagaaagcaa

SEQ ID NO: 1586 - DNA, 18 bp, Vibrio parahaemolyticus
  Vibrio parahaemolyticus S487-4
aggtccggaaggaagcag

SEQ ID NO: 1587 - DNA, 28 bp, Vibrio cholerae
  Vibrio cholerae YB2G01
ttgccctgccgcataggcagccaagaaa

SEQ ID NO: 1588 - DNA, 28 bp, Vibrio cholerae
  Vibrio cholerae YB2G01
gtgacctgccgtataggtagccaaaaat

SEQ ID NO: 1589 - DNA, 28 bp, Vibrio cholerae
  Vibrio cholerae YB2G01
cctacctgctgaacaagcagttaataat

SEQ ID NO: 1590 - DNA, 32 bp, Vibrio cholerae; identical to SEQ ID NO: 242
  Vibrio cholerae YB2G01

SEQ ID NO: 1591 - DNA, 18 bp, Vibrio cholerae
  Vibrio cholerae YB2G01
aggtcaggaagaaagcaa

SEQ ID NO: 1592 - DNA, 18 bp, Vibrio cholerae
  Vibrio cholerae YB2G01
agatccggaaggaagcag

SEQ ID NO: 1593 - DNA, 28 bp, Vibrio harveyi
  Vibrio harveyi FDAARGOS_106
gtgtcctgccgtataggcagctaagaaa

SEQ ID NO: 1594 - DNA, 28 bp, Vibrio harveyi
  Vibrio harveyi FDAARGOS_106
gtgtcctgccgcataggcagctaagaat

SEQ ID NO: 1595 - DNA, 28 bp, Vibrio harveyi
  Vibrio harveyi FDAARGOS_106
gtgccctgccgtataggcagttaagaat

SEQ ID NO: 1596 - DNA, 28 bp, Vibrio harveyi
  Vibrio harveyi FDAARGOS_106
ccgacctgctgaacaagcagttaagaat

SEQ ID NO: 1597 - DNA, 32 bp, Vibrio harveyi
  Vibrio harveyi FDAARGOS_106
acgctgaaccggaaggtggttacctaaaccca

SEQ ID NO: 1598 - DNA, 32 bp, Vibrio harveyi
  Vibrio harveyi FDAARGOS_106
tgtatctcgaattcgtgtttgcacgactgtat

SEQ ID NO: 1599 - DNA, 18 bp, Vibrio harveyi
  Vibrio harveyi FDAARGOS_106
aggtctggaagaaagcaa

SEQ ID NO: 1600 - DNA, 18 bp, Vibrio harveyi
  Vibrio harveyi FDAARGOS_106
aggtccggaaggaagcag

SEQ ID NO: 1601 - DNA, 28 bp, Vibrio anguillarum
  Vibrio anguillarum 90-11-286
gtgacctgccgcataggcagccaagaaa

SEQ ID NO: 1602 - DNA, 28 bp, Vibrio anguillarum
  Vibrio anguillarum 90-11-286
gtgacctgccgcataggcagctaagaat

SEQ ID NO: 1603 - DNA, 28 bp, Vibrio anguillarum
  Vibrio anguillarum 90-11-286
ccgacctgctggacaagcagttaataaa

SEQ ID NO: 1604 - DNA, 32 bp, Vibrio anguillarum
  Vibrio anguillarum 90-11-286
atcatgcgtaacgcttttgcaagtccatcgtt

SEQ ID NO: 1605 - DNA, 18 bp, Vibrio anguillarum
  Vibrio anguillarum 90-11-286
aggtcaggaagaaagcaa

SEQ ID NO: 1606 - DNA, 18 bp, Vibrio anguillarum
  Vibrio anguillarum 90-11-286
aggcccggaagggagcag

SEQ ID NO: 1607 - DNA, 28 bp, Vibrio parahaemolyticus
  Vibrio parahaemolyticus -
gtgtcctgccgtgtaggcagctaagaaa

SEQ ID NO: 1608 - DNA, 28 bp, Vibrio parahaemolyticus
  Vibrio parahaemolyticus -
gtgtcctgccgcataggcagccaataat

SEQ ID NO: 1609 - DNA, 28 bp, Vibrio parahaemolyticus
  Vibrio parahaemolyticus -
gtgacctgccgtataggcagccaagaat

SEQ ID NO: 1610 - DNA, 28 bp, Vibrio parahaemolyticus
  Vibrio parahaemolyticus -
cctacctgctgaacaagcagttaataat

SEQ ID NO: 1611 - DNA, 32 bp, Vibrio parahaemolyticus; identical to SEQ ID NO: 31
  Vibrio parahaemolyticus -

SEQ ID NO: 1612 - DNA, 32 bp, Vibrio parahaemolyticus; identical to SEQ ID NO: 32
  Vibrio parahaemolyticus -

SEQ ID NO: 1613 - DNA, 18 bp, Vibrio parahaemolyticus
  Vibrio parahaemolyticus -
aggtcaggaagaaagcaa

SEQ ID NO: 1614 - DNA, 18 bp, Vibrio parahaemolyticus
  Vibrio parahaemolyticus -
aggtccggaaggaagcag

SEQ ID NO: 1615 - DNA, 28 bp, Aliivibrio sp.
  Aliivibrio sp. 1S175
gtaacctgccggataggcagccaagaat

SEQ ID NO: 1616 - DNA, 32 bp, Aliivibrio sp.; identical to SEQ ID NO: 78
  Aliivibrio sp. 1S175

SEQ ID NO: 1617 - DNA, 28 bp, Vibrio parahaemolyticus
  Vibrio parahaemolyticus KVp10
ggtatctgccgcataggcagtcaagaaa

SEQ ID NO: 1618 - DNA, 28 bp, Vibrio parahaemolyticus
  Vibrio parahaemolyticus KVp10
gtgatctgccgcataggcagctaagaat

SEQ ID NO: 1619 - DNA, 28 bp, Vibrio parahaemolyticus
  Vibrio parahaemolyticus KVp10
cctacctgctgaacaagcagtttttatt

SEQ ID NO: 1620 - DNA, 32 bp, Vibrio parahaemolyticus; identical to SEQ ID NO: 82
  Vibrio parahaemolyticus KVp10

SEQ ID NO: 1621 - DNA, 18 bp, Vibrio parahaemolyticus
  Vibrio parahaemolyticus KVp10
aggtctggaagaaaacaa

SEQ ID NO: 1622 - DNA, 18 bp, Vibrio parahaemolyticus
  Vibrio parahaemolyticus KVp10
aggtccggaaggaagcag

SEQ ID NO: 1623 - DNA, 28 bp, Vibrio parahaemolyticus
  Vibrio parahaemolyticus CDC_K4762
gtgtcctgccgcataggcagctaaaaat

SEQ ID NO: 1624 - DNA, 28 bp, Vibrio parahaemolyticus
  Vibrio parahaemolyticus CDC_K4762
gtgtcctgccgcataggcagctaagaat

SEQ ID NO: 1625 - DNA, 28 bp, Vibrio parahaemolyticus
  Vibrio parahaemolyticus CDC_K4762
ccgacctgctgaacaagcagttagaagc

SEQ ID NO: 1626 - DNA, 32 bp, Vibrio parahaemolyticus
  Vibrio parahaemolyticus CDC_K4762
tgtttgtgtgggatttggacgaactctaactt

SEQ ID NO: 1627 - DNA, 32 bp, Vibrio parahaemolyticus
  Vibrio parahaemolyticus CDC_K4762
tttttctatgaatgagatctttgaagccgata

SEQ ID NO: 1628 - DNA, 18 bp, Vibrio parahaemolyticus
  Vibrio parahaemolyticus CDC_K4762
aggtcaggaagaaaacaa

SEQ ID NO: 1629 - DNA, 18 bp, Vibrio parahaemolyticus
  Vibrio parahaemolyticus CDC_K4762
aggtccggaaggaagcag

SEQ ID NO: 1630 - DNA, 28 bp, Vibrio parahaemolyticus
  Vibrio parahaemolyticus CDC_K5582
gtgtcctgccgtgtaggcagctaagaaa

SEQ ID NO: 1631 - DNA, 28 bp, Vibrio parahaemolyticus
  Vibrio parahaemolyticus CDC_K5582
gtgtcctgccgcataggcagccaataat

SEQ ID NO: 1632 - DNA, 28 bp, Vibrio parahaemolyticus
  Vibrio parahaemolyticus CDC_K5582
gtgacctgccgtataggcagccaagaat

SEQ ID NO: 1633 - DNA, 28 bp, Vibrio parahaemolyticus
  Vibrio parahaemolyticus CDC_K5582
cctacctgctgaacaagcagttaataat

SEQ ID NO: 1634 - DNA, 32 bp, Vibrio parahaemolyticus; identical to SEQ ID NO: 31
  Vibrio parahaemolyticus CDC_K5582

SEQ ID NO: 1635 - DNA, 32 bp, Vibrio parahaemolyticus; identical to SEQ ID NO: 32
  Vibrio parahaemolyticus CDC_K5582

SEQ ID NO: 1636 - DNA, 18 bp, Vibrio parahaemolyticus
  Vibrio parahaemolyticus CDC_K5582
aggtcaggaagaaagcaa

SEQ ID NO: 1637 - DNA, 18 bp, Vibrio parahaemolyticus
  Vibrio parahaemolyticus CDC_K5582
aggtccggaaggaagcag

SEQ ID NO: 1638 - DNA, 28 bp, Vibrio mimicus
  Vibrio mimicus SCCF01
gtgttctgccgaataggcagccaagaat

SEQ ID NO: 1639 - DNA, 28 bp, Vibrio mimicus
  Vibrio mimicus SCCF01
gtgttctgccgaataggcagctaagaat

SEQ ID NO: 1640 - DNA, 28 bp, Vibrio mimicus
  Vibrio mimicus SCCF01
cctacctgctgaacaagcagttaataat

SEQ ID NO: 1641 - DNA, 32 bp, Vibrio mimicus
  Vibrio mimicus SCCF01
tatctatggtgactatcataagatgtacggtt

SEQ ID NO: 1642 - DNA, 18 bp, Vibrio mimicus
  Vibrio mimicus SCCF01
aggtcaggaagcaagcaa

SEQ ID NO: 1643 - DNA, 18 bp, Vibrio mimicus
  Vibrio mimicus SCCF01
agatccggaaggaagcag

SEQ ID NO: 1644 - DNA, 28 bp, Oceanospirillum linum
  Oceanospirillum linum ATCC 11336
gtgatctgccgcataggcagttggtaat

SEQ ID NO: 1645 - DNA, 28 bp, Oceanospirillum linum
  Oceanospirillum linum ATCC 11336
gtgatctgctgcgtaggcagttggcaaa

SEQ ID NO: 1646 - DNA, 28 bp, Oceanospirillum linum
  Oceanospirillum linum ATCC 11336
cagctctgccgaataggcagttggtaat

SEQ ID NO: 1647 - DNA, 28 bp, Oceanospirillum linum
  Oceanospirillum linum ATCC 11336
attatctgccgaataggcagttgacgaa

SEQ ID NO: 1648 - DNA, 32 bp, Oceanospirillum linum; identical to SEQ ID NO: 508
  Oceanospirillum linum ATCC 11336

SEQ ID NO: 1649 - DNA, 31 bp, Oceanospirillum linum; identical to SEQ ID NO: 509
  Oceanospirillum linum ATCC 11336

SEQ ID NO: 1650 - DNA, 33 bp, Oceanospirillum linum; identical to SEQ ID NO: 510
  Oceanospirillum linum ATCC 11336

SEQ ID NO: 1651 - DNA, 32 bp, Oceanospirillum linum; identical to SEQ ID NO: 511
  Oceanospirillum linum ATCC 11336

SEQ ID NO: 1652 - DNA, 32 bp, Oceanospirillum linum; identical to SEQ ID NO: 512
  Oceanospirillum linum ATCC 11336

SEQ ID NO: 1653 - DNA, 32 bp, Oceanospirillum linum; identical to SEQ ID NO: 513
  Oceanospirillum linum ATCC 11336

SEQ ID NO: 1654 - DNA, 32 bp, Oceanospirillum linum; identical to SEQ ID NO: 514
  Oceanospirillum linum ATCC 11336

SEQ ID NO: 1655 - DNA, 31 bp, Oceanospirillum linum; identical to SEQ ID NO: 515
  Oceanospirillum linum ATCC 11336

SEQ ID NO: 1656 - DNA, 32 bp, Oceanospirillum linum; identical to SEQ ID NO: 516
  Oceanospirillum linum ATCC 11336

SEQ ID NO: 1657 - DNA, 32 bp, Oceanospirillum linum; identical to SEQ ID NO: 517
  Oceanospirillum linum ATCC 11336

SEQ ID NO: 1658 - DNA, 32 bp, Oceanospirillum linum; identical to SEQ ID NO: 518
  Oceanospirillum linum ATCC 11336

SEQ ID NO: 1659 - DNA, 28 bp, Vibrio campbellii
  Vibrio campbellii ATCC 25920, CAIM 519T
gtgtcctgccgaataggcagctaagaaa

SEQ ID NO: 1660 - DNA, 28 bp, Vibrio campbellii
  Vibrio campbellii ATCC 25920, CAIM 519T
gtgtcctgccgaataggcagctaagaat

SEQ ID NO: 1661 - DNA, 28 bp, Vibrio campbellii
  Vibrio campbellii ATCC 25920, CAIM 519T
ccagcctgctgaacaagcagttaataat

SEQ ID NO: 1662 - DNA, 32 bp, Vibrio campbellii
  Vibrio campbellii ATCC 25920, CAIM 519T
atcttgcgtgtattgctgagtttgacgcgtcc

SEQ ID NO: 1663 - DNA, 18 bp, Vibrio campbellii
  Vibrio campbellii ATCC 25920, CAIM 519T
aggccaggaagaaagcaa

SEQ ID NO: 1664 - DNA, 18 bp, Vibrio campbellii
  Vibrio campbellii ATCC 25920, CAIM 519T
aggtccggaaggaagcag

SEQ ID NO: 1665 - DNA, 28 bp, Vibrio parahaemolyticus
  Vibrio parahaemolyticus MAVP-A
gtgtcctgccgtgtaggcagctaagaaa

SEQ ID NO: 1666 - DNA, 28 bp, Vibrio parahaemolyticus
  Vibrio parahaemolyticus MAVP-A
gtgtcctgccgcataggcagccaataat

SEQ ID NO: 1667 - DNA, 28 bp, Vibrio parahaemolyticus
  Vibrio parahaemolyticus MAVP-A
gtgacctgccgtataggcagccaagaat

SEQ ID NO: 1668 - DNA, 28 bp, Vibrio parahaemolyticus
  Vibrio parahaemolyticus MAVP-A
cctacctgctgaacaagcagttaataat

SEQ ID NO: 1669 - DNA, 32 bp, Vibrio parahaemolyticus; identical to SEQ ID NO: 31
  Vibrio parahaemolyticus MAVP-A

SEQ ID NO: 1670 - DNA, 32 bp, Vibrio parahaemolyticus; identical to SEQ ID NO: 32
  Vibrio parahaemolyticus MAVP-A

SEQ ID NO: 1671 - DNA, 18 bp, Vibrio parahaemolyticus
  Vibrio parahaemolyticus MAVP-A
aggtcaggaagaaagcaa

SEQ ID NO: 1672 - DNA, 18 bp, Vibrio parahaemolyticus
  Vibrio parahaemolyticus MAVP-A
aggtccggaaggaagcag

SEQ ID NO: 1673 - DNA, 28 bp, Vibrio parahaemolyticus
  Vibrio parahaemolyticus MAVP-T
gtgtcctgccgtgtaggcagctaagaaa

SEQ ID NO: 1674 - DNA, 28 bp, Vibrio parahaemolyticus
  Vibrio parahaemolyticus MAVP-T
gtgtcctgccgcataggcagccaataat

SEQ ID NO: 1675 - DNA, 28 bp, Vibrio parahaemolyticus
  Vibrio parahaemolyticus MAVP-T
gtgacctgccgtataggcagccaagaat

SEQ ID NO: 1676 - DNA, 28 bp, Vibrio parahaemolyticus
  Vibrio parahaemolyticus MAVP-T
cctacctgctgaacaagcagttaataat

SEQ ID NO: 1677 - DNA, 32 bp, Vibrio parahaemolyticus; identical to SEQ ID NO: 31
  Vibrio parahaemolyticus MAVP-T

SEQ ID NO: 1678 - DNA, 32 bp, Vibrio parahaemolyticus; identical to SEQ ID NO: 32
  Vibrio parahaemolyticus MAVP-T

SEQ ID NO: 1679 - DNA, 18 bp, Vibrio parahaemolyticus
  Vibrio parahaemolyticus MAVP-T
aggtcaggaagaaagcaa

SEQ ID NO: 1680 - DNA, 18 bp, Vibrio parahaemolyticus
  Vibrio parahaemolyticus MAVP-T
aggtccggaaggaagcag

SEQ ID NO: 1681 - DNA, 28 bp, Vibrio parahaemolyticus
  Vibrio parahaemolyticus MAVP39
gtgtcctgccgtgtaggcagctaagaaa

SEQ ID NO: 1682 - DNA, 28 bp, Vibrio parahaemolyticus
  Vibrio parahaemolyticus MAVP39
gtgtcctgccgcataggcagccaataat

SEQ ID NO: 1683 - DNA, 28 bp, Vibrio parahaemolyticus
  Vibrio parahaemolyticus MAVP39
gtgacctgccgtataggcagccaagaat

SEQ ID NO: 1684 - DNA, 28 bp, Vibrio parahaemolyticus
  Vibrio parahaemolyticus MAVP39
cctacctgctgaacaagcagttaataat

SEQ ID NO: 1685 - DNA, 32 bp, Vibrio parahaemolyticus; identical to SEQ ID NO: 31
  Vibrio parahaemolyticus MAVP39

SEQ ID NO: 1686 - DNA, 32 bp, Vibrio parahaemolyticus; identical to SEQ ID NO: 32
  Vibrio parahaemolyticus MAVP39

SEQ ID NO: 1687 - DNA, 18 bp, Vibrio parahaemolyticus
  Vibrio parahaemolyticus MAVP39
aggtcaggaagaaagcaa

SEQ ID NO: 1688 - DNA, 18 bp, Vibrio parahaemolyticus
  Vibrio parahaemolyticus MAVP39
aggtccggaaggaagcag

SEQ ID NO: 1689 - DNA, 28 bp, Vibrio parahaemolyticus
  Vibrio parahaemolyticus MAVP74
gtgtcctgccgtgtaggcagctaagaaa

SEQ ID NO: 1690 - DNA, 28 bp, Vibrio parahaemolyticus
  Vibrio parahaemolyticus MAVP74
gtgtcctgccgcataggcagccaataat

SEQ ID NO: 1691 - DNA, 28 bp, Vibrio parahaemolyticus
  Vibrio parahaemolyticus MAVP74
gtgacctgccgtataggcagccaagaat

SEQ ID NO: 1692 - DNA, 28 bp, Vibrio parahaemolyticus
  Vibrio parahaemolyticus MAVP74
cctacctgctgaacaagcagttaataat

SEQ ID NO: 1693 - DNA, 32 bp, Vibrio parahaemolyticus; identical to SEQ ID NO: 31
  Vibrio parahaemolyticus MAVP74

SEQ ID NO: 1694 - DNA, 32 bp, Vibrio parahaemolyticus; identical to SEQ ID NO: 32
  Vibrio parahaemolyticus MAVP74

SEQ ID NO: 1695 - DNA, 18 bp, Vibrio parahaemolyticus
  Vibrio parahaemolyticus MAVP74
aggtcaggaagaaagcaa

SEQ ID NO: 1696 - DNA, 18 bp, Vibrio parahaemolyticus
  Vibrio parahaemolyticus MAVP74
aggtccggaaggaagcag

SEQ ID NO: 1697 - DNA, 28 bp, Vibrio parahaemolyticus
  Vibrio parahaemolyticus G149
gtgtcctgccgtgtaggcagctaagaaa

SEQ ID NO: 1698 - DNA, 28 bp, Vibrio parahaemolyticus
  Vibrio parahaemolyticus G149
gtgtcctgccgcataggcagccaataat

SEQ ID NO: 1699 - DNA, 28 bp, Vibrio parahaemolyticus
  Vibrio parahaemolyticus G149
gtgacctgccgtataggcagccaagaat

SEQ ID NO: 1700 - DNA, 28 bp, Vibrio parahaemolyticus
  Vibrio parahaemolyticus G149
cctacctgctgaacaagcagttaataat

SEQ ID NO: 1701 - DNA, 32 bp, Vibrio parahaemolyticus; identical to SEQ ID NO: 31
  Vibrio parahaemolyticus G149

SEQ ID NO: 1702 - DNA, 32 bp, Vibrio parahaemolyticus; identical to SEQ ID NO: 32
  Vibrio parahaemolyticus G149

SEQ ID NO: 1703 - DNA, 18 bp, Vibrio parahaemolyticus
  Vibrio parahaemolyticus G149
aggtcaggaagaaagcaa

SEQ ID NO: 1704 - DNA, 18 bp, Vibrio parahaemolyticus
  Vibrio parahaemolyticus G149
aggtccggaaggaagcag

SEQ ID NO: 1705 - DNA, 28 bp, Vibrio parahaemolyticus
  Vibrio parahaemolyticus MAVP-109
gtgtcctgccgtgtaggcagctaagaaa

SEQ ID NO: 1706 - DNA, 28 bp, Vibrio parahaemolyticus
  Vibrio parahaemolyticus MAVP-109
gtgtcctgccgcataggcagccaataat

SEQ ID NO: 1707 - DNA, 28 bp, Vibrio parahaemolyticus
  Vibrio parahaemolyticus MAVP-109
gtgacctgccgtataggcagccaagaat

SEQ ID NO: 1708 - DNA, 28 bp, Vibrio parahaemolyticus
  Vibrio parahaemolyticus MAVP-109
cctacctgctgaacaagcagttaataat

SEQ ID NO: 1709 - DNA, 32 bp, Vibrio parahaemolyticus; identical to SEQ ID NO: 31
  Vibrio parahaemolyticus MAVP-109

SEQ ID NO: 1710 - DNA, 32 bp, Vibrio parahaemolyticus; identical to SEQ ID NO: 32
  Vibrio parahaemolyticus MAVP-109

SEQ ID NO: 1711 - DNA, 18 bp, Vibrio parahaemolyticus
  Vibrio parahaemolyticus MAVP-109
aggtcaggaagaaagcaa

SEQ ID NO: 1712 - DNA, 18 bp, Vibrio parahaemolyticus
  Vibrio parahaemolyticus MAVP-109
aggtccggaaggaagcag

SEQ ID NO: 1713 - DNA, 28 bp, Vibrio parahaemolyticus
  Vibrio parahaemolyticus MEVP12
gtgtcctgccgtgtaggcagctaagaaa

SEQ ID NO: 1714 - DNA, 28 bp, Vibrio parahaemolyticus
  Vibrio parahaemolyticus MEVP12
gtgtcctgccgcataggcagccaataat

SEQ ID NO: 1715 - DNA, 28 bp, Vibrio parahaemolyticus
  Vibrio parahaemolyticus MEVP12
gtgacctgccgtataggcagccaagaat

SEQ ID NO: 1716 - DNA, 28 bp, Vibrio parahaemolyticus
  Vibrio parahaemolyticus MEVP12
cctacctgctgaacaagcagttaataat

SEQ ID NO: 1717 - DNA, 32 bp, Vibrio parahaemolyticus; identical to SEQ ID NO: 31
  Vibrio parahaemolyticus MEVP12

SEQ ID NO: 1718 - DNA, 32 bp, Vibrio parahaemolyticus; identical to SEQ ID NO: 32
  Vibrio parahaemolyticus MEVP12

SEQ ID NO: 1719 - DNA, 18 bp, Vibrio parahaemolyticus
  Vibrio parahaemolyticus MEVP12
aggtcaggaagaaagcaa

SEQ ID NO: 1720 - DNA, 18 bp, Vibrio parahaemolyticus
  Vibrio parahaemolyticus MEVP12
aggtccggaaggaagcag

SEQ ID NO: 1721 - DNA, 28 bp, Vibrio parahaemolyticus
  Vibrio parahaemolyticus CTVP31C
gtgtcctgccgtgtaggcagctaagaaa

SEQ ID NO: 1722 - DNA, 28 bp, Vibrio parahaemolyticus
  Vibrio parahaemolyticus CTVP31C
gtgtcctgccgcataggcagccaataat

SEQ ID NO: 1723 - DNA, 28 bp, Vibrio parahaemolyticus
  Vibrio parahaemolyticus CTVP31C
gtgacctgccgtataggcagccaagaat

SEQ ID NO: 1724 - DNA, 28 bp, Vibrio parahaemolyticus
  Vibrio parahaemolyticus CTVP31C
cctacctgctgaacaagcagttaataat

SEQ ID NO: 1725 - DNA, 32 bp, Vibrio parahaemolyticus; identical to SEQ ID NO: 31
  Vibrio parahaemolyticus CTVP31C

SEQ ID NO: 1726 - DNA, 32 bp, Vibrio parahaemolyticus; identical to SEQ ID NO: 32
  Vibrio parahaemolyticus CTVP31C

SEQ ID NO: 1727 - DNA, 18 bp, Vibrio parahaemolyticus
  Vibrio parahaemolyticus CTVP31C
aggtcaggaagaaagcaa

SEQ ID NO: 1728 - DNA, 18 bp, Vibrio parahaemolyticus
  Vibrio parahaemolyticus CTVP31C
aggtccggaaggaagcag

SEQ ID NO: 1729 - DNA, 28 bp, Vibrio parahaemolyticus
  Vibrio parahaemolyticus CTVP27C
gtgtcctgccgtgtaggcagctaagaaa

SEQ ID NO: 1730 - DNA, 28 bp, Vibrio parahaemolyticus
  Vibrio parahaemolyticus CTVP27C
gtgtcctgccgcataggcagccaataat

SEQ ID NO: 1731 - DNA, 28 bp, Vibrio parahaemolyticus
  Vibrio parahaemolyticus CTVP27C
gtgacctgccgtataggcagccaagaat

SEQ ID NO: 1732 - DNA, 28 bp, Vibrio parahaemolyticus
  Vibrio parahaemolyticus CTVP27C
cctacctgctgaacaagcagttaataat

SEQ ID NO: 1733 - DNA, 32 bp, Vibrio parahaemolyticus; identical to SEQ ID NO: 31
  Vibrio parahaemolyticus CTVP27C

SEQ ID NO: 1734 - DNA, 32 bp, Vibrio parahaemolyticus; identical to SEQ ID NO: 32
  Vibrio parahaemolyticus CTVP27C

SEQ ID NO: 1735 - DNA, 18 bp, Vibrio parahaemolyticus
  Vibrio parahaemolyticus CTVP27C
aggtcaggaagaaagcaa

SEQ ID NO: 1736 - DNA, 18 bp, Vibrio parahaemolyticus
  Vibrio parahaemolyticus CTVP27C
aggtccggaaggaagcag

SEQ ID NO: 1737 - DNA, 28 bp, Pseudoalteromonas issachenkonii
  Pseudoalteromonas issachenkonii KMM 3549
gtgaactgccgagtaggcagctgaaaat

SEQ ID NO: 1738 - DNA, 28 bp, Pseudoalteromonas issachenkonii
  Pseudoalteromonas issachenkonii KMM 3549
atcttctgccgaataggcagctgaaatt

SEQ ID NO: 1739 - DNA, 28 bp, Pseudoalteromonas issachenkonii
  Pseudoalteromonas issachenkonii KMM 3549
tataactgccgaaaaggcagaggctaaa

SEQ ID NO: 1740 - DNA, 32 bp, Pseudoalteromonas issachenkonii; identical to SEQ ID NO: 837
  Pseudoalteromonas issachenkonii KMM 3549

SEQ ID NO: 1741 - DNA, 34 bp, Pseudoalteromonas issachenkonii; identical to SEQ ID NO: 838
  Pseudoalteromonas issachenkonii KMM 3549

SEQ ID NO: 1742 - DNA, 34 bp, Pseudoalteromonas issachenkonii; identical to SEQ ID NO: 839
  Pseudoalteromonas issachenkonii KMM 3549

SEQ ID NO: 1743 - DNA, 28 bp, Pseudoalteromonas sp.
  Pseudoalteromonas sp. GutCa3
gtgaactgccgagtaggcagctggaaat

SEQ ID NO: 1744 - DNA, 28 bp, Pseudoalteromonas sp.
  Pseudoalteromonas sp. GutCa3
gtgaactgccgagtaggcagctgaagtt

SEQ ID NO: 1745 - DNA, 28 bp, Pseudoalteromonas sp.
  Pseudoalteromonas sp. GutCa3
tttaactgccgaaaaggcagaggctaaa

SEQ ID NO: 1746 - DNA, 32 bp, Pseudoalteromonas sp.; identical to SEQ ID NO: 320
  Pseudoalteromonas sp. GutCa3

SEQ ID NO: 1747 - DNA, 33 bp, Pseudoalteromonas sp.; identical to SEQ ID NO: 321
  Pseudoalteromonas sp. GutCa3

SEQ ID NO: 1748 - DNA, 33 bp, Pseudoalteromonas sp.; identical to SEQ ID NO: 20
  Pseudoalteromonas sp. GutCa3

SEQ ID NO: 1749 - DNA, 28 bp, Vibrio lentus
  Vibrio lentus 10N.286.45.C8
gtgtcctgccgaataggcagctaagaaa

SEQ ID NO: 1750 - DNA, 28 bp, Vibrio lentus
  Vibrio lentus 10N.286.45.C8
gtgtcctgccgaataggcagctaagaat

SEQ ID NO: 1751 - DNA, 28 bp, Vibrio lentus
  Vibrio lentus 10N.286.45.C8
ccaacctgctgaacaagcagctaagaat

SEQ ID NO: 1752 - DNA, 32 bp, Vibrio lentus
  Vibrio lentus 10N.286.45.C8
ggtctatgagacgaatgggtcgttggattatc

SEQ ID NO: 1753 - DNA, 18 bp, Vibrio lentus
  Vibrio lentus 10N.286.45.C8
aggccaggaagaaagcaa

SEQ ID NO: 1754 - DNA, 18 bp, Vibrio lentus
  Vibrio lentus 10N.286.45.C8
aggcctggaagggagcag

SEQ ID NO: 1755 - DNA, 28 bp, Vibrio lentus
  Vibrio lentus 10N.286.51.B9
gtgtcctgccgcataggcagctaagaaa

SEQ ID NO: 1756 - DNA, 28 bp, Vibrio lentus
  Vibrio lentus 10N.286.51.B9
gtgtcctgccgcataggcagctaagaat

SEQ ID NO: 1757 - DNA, 28 bp, Vibrio lentus
  Vibrio lentus 10N.286.51.B9
ccttcctgctgaacaagcagttaataat

SEQ ID NO: 1758 - DNA, 32 bp, Vibrio lentus; identical to SEQ ID NO: 338
  Vibrio lentus 10N.286.51.B9

SEQ ID NO: 1759 - DNA, 18 bp, Vibrio lentus
  Vibrio lentus 10N.286.51.B9
aggccaggaagaaagcaa

SEQ ID NO: 1760 - DNA, 18 bp, Vibrio lentus
  Vibrio lentus 10N.286.51.B9
aggcctggaagggagcag

SEQ ID NO: 1761 - DNA, 28 bp, Vibrio breoganii
  Vibrio breoganii 10N.222.49.A5
gtgtcctgccgcataggcagctaagaat

SEQ ID NO: 1762 - DNA, 28 bp, Vibrio breoganii
  Vibrio breoganii 10N.222.49.A5
ccggcctgctgaacaagcagaatatgat

SEQ ID NO: 1763 - DNA, 32 bp, Vibrio breoganii; identical to SEQ ID NO: 139
  Vibrio breoganii 10N.222.49.A5

SEQ ID NO: 1764 - DNA, 18 bp, Vibrio breoganii
  Vibrio breoganii 10N.222.49.A5
agatcaggaagaaaacaa

SEQ ID NO: 1765 - DNA, 18 bp, Vibrio breoganii
  Vibrio breoganii 10N.222.49.A5
aggtccggaaggaagcag

SEQ ID NO: 1766 - DNA, 28 bp, Vibrio sp.
  Vibrio sp. 10N.261.46.F12
gtgacctgccgcataggcagctaagaaa

SEQ ID NO: 1767 - DNA, 28 bp, Vibrio sp.
  Vibrio sp. 10N.261.46.F12
gtgtcctgccgcataggcagttaagaat

SEQ ID NO: 1768 - DNA, 28 bp, Vibrio sp.
  Vibrio sp. 10N.261.46.F12
ccatcctgctgaacaagcagttaataat

SEQ ID NO: 1769 - DNA, 32 bp, Vibrio sp.; identical to SEQ ID NO: 275
  Vibrio sp. 10N.261.46.F12

SEQ ID NO: 1770 - DNA, 32 bp, Vibrio sp.; identical to SEQ ID NO: 276
  Vibrio sp. 10N.261.46.F12

SEQ ID NO: 1771 - DNA, 32 bp, Vibrio sp.; identical to SEQ ID NO: 277
  Vibrio sp. 10N.261.46.F12

SEQ ID NO: 1772 - DNA, 18 bp, Vibrio sp.
  Vibrio sp. 10N.261.46.F12
aggccaggaagaaagcaa

SEQ ID NO: 1773 - DNA, 32 bp, Vibrio sp.; identical to SEQ ID NO: 279
  Vibrio sp. 10N.261.46.F12

SEQ ID NO: 1774 - DNA, 28 bp, Vibrio sp.
  Vibrio sp. 10N.261.49.E11
gtgacctgccgcataggcagctaagaaa

SEQ ID NO: 1775 - DNA, 28 bp, Vibrio sp.
  Vibrio sp. 10N.261.49.E11
gtgtcctgccgcataggcagttaagaat

SEQ ID NO: 1776 - DNA, 28 bp, Vibrio sp.
  Vibrio sp. 10N.261.49.E11
ccatcctgctgaacaagcagttaataat

SEQ ID NO: 1777 - DNA, 32 bp, Vibrio sp.; identical to SEQ ID NO: 275
  Vibrio sp. 10N.261.49.E11

SEQ ID NO: 1778 - DNA, 31 bp, Vibrio sp.; identical to SEQ ID NO: 571
  Vibrio sp. 10N.261.49.E11

SEQ ID NO: 1779 - DNA, 32 bp, Vibrio sp.; identical to SEQ ID NO: 277
  Vibrio sp. 10N.261.49.E11

SEQ ID NO: 1780 - DNA, 18 bp, Vibrio sp.
  Vibrio sp. 10N.261.49.E11
aggccaggaagaaagcaa

SEQ ID NO: 1781 - DNA, 32 bp, Vibrio sp.; identical to SEQ ID NO: 279
  Vibrio sp. 10N.261.49.E11

SEQ ID NO: 1782 - DNA, 28 bp, Photobacterium damselae
  Photobacterium damselae 940804-1/1
gtgtcctgccgcataggtagctaaaaat

SEQ ID NO: 1783 - DNA, 28 bp, Photobacterium damselae
  Photobacterium damselae 940804-1/1
gtgtcctgccgcataggcagctaagaat

SEQ ID NO: 1784 - DNA, 28 bp, Photobacterium damselae
  Photobacterium damselae 940804-1/1
cctacctgctgaacaagcagttaataat

SEQ ID NO: 1785 - DNA, 32 bp, Photobacterium damselae; identical to SEQ ID NO: 437
  Photobacterium damselae 940804-1/1

SEQ ID NO: 1786 - DNA, 18 bp, Photobacterium damselae
  Photobacterium damselae 940804-1/1
aggtcaggaagaaagcaa

SEQ ID NO: 1787 - DNA, 18 bp, Photobacterium damselae
  Photobacterium damselae 940804-1/1
aggtccggaaggaagcag

SEQ ID NO: 1788 - DNA, 28 bp, Photobacterium ganghwense
  Photobacterium ganghwense JCM 12487
gtgacctgccggataggcagctgagaaa

SEQ ID NO: 1789 - DNA, 28 bp, Photobacterium ganghwense
  Photobacterium ganghwense JCM 12487
gtgacctgccggataggcagttgagata

SEQ ID NO: 1790 - DNA, 28 bp, Photobacterium ganghwense
  Photobacterium ganghwense JCM 12487
aagacctgccgtggaggcagccaatgat

SEQ ID NO: 1791 - DNA, 28 bp, Photobacterium ganghwense
  Photobacterium ganghwense JCM 12487
taagactgccgaataactagggttctcg

SEQ ID NO: 1792 - DNA, 28 bp, Photobacterium ganghwense
  Photobacterium ganghwense JCM 12487
tgcgtacgccgaatatgattgccggttt

SEQ ID NO: 1793 - DNA, 32 bp, Photobacterium ganghwense; identical to SEQ ID NO: 671
  Photobacterium ganghwense JCM 12487

SEQ ID NO: 1794 - DNA, 32 bp, Photobacterium ganghwense; identical to SEQ ID NO: 672
  Photobacterium ganghwense JCM 12487

SEQ ID NO: 1795 - DNA, 34 bp, Photobacterium ganghwense; identical to SEQ ID NO: 673
  Photobacterium ganghwense JCM 12487

SEQ ID NO: 1796 - DNA, 33 bp, Photobacterium ganghwense
  Photobacterium ganghwense JCM 12487
cgcagtttttcagccagaagcttaatgtacgtt

SEQ ID NO: 1797 - DNA, 34 bp, Photobacterium ganghwense; identical to SEQ ID NO: 674
  Photobacterium ganghwense JCM 12487

SEQ ID NO: 1798 - DNA, 28 bp, Vibrio splendidus
  Vibrio splendidus ZS_173
gtgtcctgccgcataggcagctaagaaa

SEQ ID NO: 1799 - DNA, 28 bp, Vibrio splendidus
  Vibrio splendidus ZS_173
gtgtcctgccgcataggcagctaagaat

SEQ ID NO: 1800 - DNA, 28 bp, Vibrio splendidus
  Vibrio splendidus ZS_173
ccttcctgctgaacaagcagttaataat

SEQ ID NO: 1801 - DNA, 32 bp, Vibrio splendidus
  Vibrio splendidus ZS_173
tgttggaaattgtccacacatcaaagactgaa

SEQ ID NO: 1802 - DNA, 18 bp, Vibrio splendidus
  Vibrio splendidus ZS_173
aggccaggaagaaagcaa

SEQ ID NO: 1803 - DNA, 18 bp, Vibrio splendidus
  Vibrio splendidus ZS_173
aggcctggaagggagcag

SEQ ID NO: 1804 - DNA, 28 bp, Vibrio cholerae
  Vibrio cholerae 3523-03
gtgttctgccgaataggcagccaagaaa

SEQ ID NO: 1805 - DNA, 28 bp, Vibrio cholerae
  Vibrio cholerae 3523-03
gtgttctgccgaataggcagccaagaat

SEQ ID NO: 1806 - DNA, 28 bp, Vibrio cholerae
  Vibrio cholerae 3523-03
cctacctgctgaacaagcagttaataat

SEQ ID NO: 1807 - DNA, 33 bp, Vibrio cholerae
  Vibrio cholerae 3523-03
cgtctgcggcggagacggtggacggattgccga

SEQ ID NO: 1808 - DNA, 32 bp, Vibrio cholerae
  Vibrio cholerae 3523-03
tcagtcgcaacgcgagccagagtttcagctag

SEQ ID NO: 1809 - DNA, 32 bp, Vibrio cholerae
  Vibrio cholerae 3523-03
tatgcaagtgaacaggaagtcatctaaaataa

SEQ ID NO: 1810 - DNA, 18 bp, Vibrio cholerae
  Vibrio cholerae 3523-03
aggtcaggaagaaagcaa

SEQ ID NO: 1811 - DNA, 18 bp, Vibrio cholerae
  Vibrio cholerae 3523-03
agatccggaaggaagcag

SEQ ID NO: 1812 - DNA, 28 bp, Vibrio cholerae
  Vibrio cholerae 20000
gtgttctgccgaataggcagccaagaaa

SEQ ID NO: 1813 - DNA, 28 bp, Vibrio cholerae
  Vibrio cholerae 20000
gtgttctgccgaataggcagccaagaat

SEQ ID NO: 1814 - DNA, 28 bp, Vibrio cholerae
  Vibrio cholerae 20000
cctacctgctgaacaagcagttaataat

SEQ ID NO: 1815 - DNA, 32 bp, Vibrio cholerae
  Vibrio cholerae 20000
acgcagccgcgcagaggtagacgcctacctcg

SEQ ID NO: 1816 - DNA, 32 bp, Vibrio cholerae; identical to SEQ ID NO: 1455
  Vibrio cholerae 20000

SEQ ID NO: 1817 - DNA, 18 bp, Vibrio cholerae
  Vibrio cholerae 20000
aggtcaggaagaaagcaa

SEQ ID NO: 1818 - DNA, 18 bp, Vibrio cholerae
  Vibrio cholerae 20000
agatccggaaggaagcag

SEQ ID NO: 1819 - DNA, 28 bp, Vibrio crassostreae
  Vibrio crassostreae 29_O_38
gtgacctgccgcataggcagctaagaac

SEQ ID NO: 1820 - DNA, 28 bp, Vibrio crassostreae
  Vibrio crassostreae 29_O_38
gtgtcctgccgcataggcagctaagaat

SEQ ID NO: 1821 - DNA, 28 bp, Vibrio crassostreae
  Vibrio crassostreae 29_O_38
ccttcctgctgaacaagtagttaaaatc

SEQ ID NO: 1822 - DNA, 31 bp, Vibrio crassostreae; identical to SEQ ID NO: 50
  Vibrio crassostreae 29_O_38

SEQ ID NO: 1823 - DNA, 18 bp, Vibrio crassostreae
  Vibrio crassostreae 29_O_38
aggccaggaagaaagcaa

SEQ ID NO: 1824 - DNA, 18 bp, Vibrio crassostreae
  Vibrio crassostreae 29_O_38
aggcctggaagggagcag

SEQ ID NO: 1825 - DNA, 28 bp, Vibrio crassostreae
  Vibrio crassostreae 16BF1_56
gtgtcctgccgcataggcagctaagaaa

SEQ ID NO: 1826 - DNA, 28 bp, Vibrio crassostreae
  Vibrio crassostreae 16BF1_56
gtgtcctgccgcataggcagctaagaat

SEQ ID NO: 1827 - DNA, 28 bp, Vibrio crassostreae
  Vibrio crassostreae 16BF1_56
ccaacctgctgaacaagcagttaagaat

SEQ ID NO: 1828 - DNA, 32 bp, Vibrio crassostreae; identical to SEQ ID NO: 1096
  Vibrio crassostreae 16BF1_56

SEQ ID NO: 1829 - DNA, 18 bp, Vibrio crassostreae
  Vibrio crassostreae 16BF1_56
aggccaggaagaaagcaa

SEQ ID NO: 1830 - DNA, 18 bp, Vibrio crassostreae
  Vibrio crassostreae 16BF1_56
aggcctggaagggagcag

SEQ ID NO: 1831 - DNA, 28 bp, Psychromonas sp.
  Psychromonas sp. RZ5
gtgtcctgccgaacaggcagctgagaat

SEQ ID NO: 1832 - DNA, 28 bp, Psychromonas sp.
  Psychromonas sp. RZ5
gtgtcctgccgaataggcagctgataat

SEQ ID NO: 1833 - DNA, 28 bp, Psychromonas sp.
  Psychromonas sp. RZ5
aatttctgccgaacaggcagttttatat

SEQ ID NO: 1834 - DNA, 32 bp, Psychromonas sp.
  Psychromonas sp. RZ5
gaaaataaaattgaagcatggatgaaagatgg

SEQ ID NO: 1835 - DNA, 31 bp, Psychromonas sp.
  Psychromonas sp. RZ5
aaaaaaaatcgctttgatgtatatgttaaac

SEQ ID NO: 1836 - DNA, 31 bp, Psychromonas sp.
  Psychromonas sp. RZ5
aaaaaaaatcgttttgatgtttatgtgaaac

SEQ ID NO: 1837 - DNA, 28 bp, Pseudoalteromonas sp.
  Pseudoalteromonas sp. S983
gtgacctgccgtataggcagctgaaaat

SEQ ID NO: 1838 - DNA, 28 bp, Pseudoalteromonas sp.
  Pseudoalteromonas sp. S983
gtgacctgccgtataggcagctgaagat

SEQ ID NO: 1839 - DNA, 28 bp, Pseudoalteromonas sp.
  Pseudoalteromonas sp. S983
taattctgccgaaaaggcagtgagtagt

SEQ ID NO: 1840 - DNA, 32 bp, Pseudoalteromonas sp.
  Pseudoalteromonas sp. S983
ttaaagtgagtaattcatcttggggctcctga

SEQ ID NO: 1841 - DNA, 32 bp, Pseudoalteromonas sp.; identical to SEQ ID NO: 648
  Pseudoalteromonas sp. S983

SEQ ID NO: 1842 - DNA, 31 bp, Pseudoalteromonas sp.; identical to SEQ ID NO: 315
  Pseudoalteromonas sp. S983

SEQ ID NO: 1843 - DNA, 31 bp, Pseudoalteromonas sp.; identical to SEQ ID NO: 650
  Pseudoalteromonas sp. S983

SEQ ID NO: 1844 - DNA, 28 bp, Vibrio parahaemolyticus
  Vibrio parahaemolyticus E1_5
gtgtcccgccgaataggcggctaagaat

SEQ ID NO: 1845 - DNA, 28 bp, Vibrio parahaemolyticus
  Vibrio parahaemolyticus E1_5
gtgtcccgccgaataggcggctaagaaa

SEQ ID NO: 1846 - DNA, 28 bp, Vibrio parahaemolyticus
  Vibrio parahaemolyticus E1_5
tccgccgagcgagtaggcggtcaagaat

SEQ ID NO: 1847 - DNA, 32 bp, Vibrio parahaemolyticus
  Vibrio parahaemolyticus E1_5
gaaaactggacgccagaaggaagacgtatcaa

SEQ ID NO: 1848 - DNA, 32 bp, Vibrio parahaemolyticus
  Vibrio parahaemolyticus E1_5
atcaagtgattggtcgccgtaaaccttgtgac

SEQ ID NO: 1849 - DNA, 36 bp, Vibrio parahaemolyticus
  Vibrio parahaemolyticus E1_5
gaggaaggaaaagaagaaaatgaagccgacgaatgt

SEQ ID NO: 1850 - DNA, 28 bp, Pseudoalteromonas luteoviolacea
  Pseudoalteromonas luteoviolacea H2
gtgacctgccgtataggcagctggaaat

SEQ ID NO: 1851 - DNA, 28 bp, Pseudoalteromonas luteoviolacea
  Pseudoalteromonas luteoviolacea H2
gtgacctgccgtataggcagctgaaatt

SEQ ID NO: 1852 - DNA, 28 bp, Pseudoalteromonas luteoviolacea
  Pseudoalteromonas luteoviolacea H2
tagaactgccgaaaaggcagagtccaat

SEQ ID NO: 1853 - DNA, 32 bp, Pseudoalteromonas luteoviolacea
  Pseudoalteromonas luteoviolacea H2
agctctctccaaagtccatgtcgatttaattt

SEQ ID NO: 1854 - DNA, 33 bp, Pseudoalteromonas luteoviolacea
  Pseudoalteromonas luteoviolacea H2
aggtcaggaagtaaacctccacatctaatgaca

SEQ ID NO: 1855 - DNA, 33 bp, Pseudoalteromonas luteoviolacea; identical to SEQ ID NO: 76
  Pseudoalteromonas luteoviolacea H2

SEQ ID NO: 1856 - DNA, 28 bp, Vibrio cholerae
  Vibrio cholerae A110621W3
gtcacctgtcgcatagacagccaagaat

SEQ ID NO: 1857 - DNA, 28 bp, Vibrio cholerae
  Vibrio cholerae A110621W3
gtcacctgccgcataggcagccaagaat

SEQ ID NO: 1858 - DNA, 28 bp, Vibrio cholerae
  Vibrio cholerae A110621W3
gtgacctgccgcataggcagccaagaat

SEQ ID NO: 1859 - DNA, 28 bp, Vibrio cholerae
  Vibrio cholerae A110621W3
cctacctgttgaacaagcagttaataat

SEQ ID NO: 1860 - DNA, 32 bp, Vibrio cholerae
  Vibrio cholerae A110621W3
tacggacaacgtaaagcttgaccggagtggaa

SEQ ID NO: 1861 - DNA, 31 bp, Vibrio cholerae; identical to SEQ ID NO: 44
  Vibrio cholerae A110621W3

SEQ ID NO: 1862 - DNA, 18 bp, Vibrio cholerae
  Vibrio cholerae A110621W3
aggtcaggaagaaagcaa

SEQ ID NO: 1863 - DNA, 18 bp, Vibrio cholerae
  Vibrio cholerae A110621W3
agatccggaaggaagcag

SEQ ID NO: 1864 - DNA, 28 bp, Neptunomonas qingdaonensis
  Neptunomonas qingdaonensis CGMCC 1.10971
tttccctgccgaataggcagctgaaaag

SEQ ID NO: 1865 - DNA, 28 bp, Neptunomonas qingdaonensis
  Neptunomonas qingdaonensis CGMCC 1.10971
atgccctgccgtgtaggcagctgaaaag

SEQ ID NO: 1866 - DNA, 28 bp, Neptunomonas qingdaonensis
  Neptunomonas qingdaonensis CGMCC 1.10971
gtatcctgccgggtaggcagttgaaaat

SEQ ID NO: 1867 - DNA, 28 bp, Neptunomonas qingdaonensis
  Neptunomonas qingdaonensis CGMCC 1.10971
aaatcctgccgaaaggcagaatggtatt

SEQ ID NO: 1868 - DNA, 32 bp, Neptunomonas qingdaonensis
  Neptunomonas qingdaonensis CGMCC 1.10971
aactgcggagcgcgttggtttaaagaaaaaga

SEQ ID NO: 1869 - DNA, 32 bp, Neptunomonas qingdaonensis
  Neptunomonas qingdaonensis CGMCC 1.10971
tgggggtaaatcgtggctttagccaccgctga

SEQ ID NO: 1870 - DNA, 33 bp, Neptunomonas qingdaonensis
  Neptunomonas qingdaonensis CGMCC 1.10971
aggactggaagaaagcaaccacatcggtctata

SEQ ID NO: 1871 - DNA, 33 bp, Neptunomonas qingdaonensis
  Neptunomonas qingdaonensis CGMCC 1.10971
aggcctggaagggagcagccacagcggtcgatt

SEQ ID NO: 1872 - DNA, 28 bp, Vibrio parahaemolyticus
  Vibrio parahaemolyticus CFSAN007436
gtgaactgccgaataggtagctgataat

SEQ ID NO: 1873 - DNA, 28 bp, Vibrio parahaemolyticus
  Vibrio parahaemolyticus CFSAN007436
gtgaactgccgcataggtagagaggatc

SEQ ID NO: 1874 - DNA, 28 bp, Vibrio parahaemolyticus
  Vibrio parahaemolyticus CFSAN007436
tcatcactactgaaaagtagctgataac

SEQ ID NO: 1875 - DNA, 28 bp, Vibrio parahaemolyticus
  Vibrio parahaemolyticus CFSAN007436
gaatactgccgaacaggtaggaggctca

SEQ ID NO: 1876 - DNA, 31 bp, Vibrio parahaemolyticus
  Vibrio parahaemolyticus CFSAN007436
tgcagacaaacaaagagccatcgacgagtgc

SEQ ID NO: 1877 - DNA, 31 bp, Vibrio parahaemolyticus
  Vibrio parahaemolyticus CFSAN007436
aaatttacatctccaggctcagccaaaaagc

SEQ ID NO: 1878 - DNA, 31 bp, Vibrio parahaemolyticus
  Vibrio parahaemolyticus CFSAN007436
aaattaacgtcgccaggttcagctaaaaaac

SEQ ID NO: 1879 - DNA, 28 bp, Vibrio parahaemolyticus
  Vibrio parahaemolyticus CFSAN007462
gtgaactgccgaataggtagctgataat

SEQ ID NO: 1880 - DNA, 28 bp, Vibrio parahaemolyticus
  Vibrio parahaemolyticus CFSAN007462
gtgaactgccgcataggtagagaggatc

SEQ ID NO: 1881 - DNA, 28 bp, Vibrio parahaemolyticus
  Vibrio parahaemolyticus CFSAN007462
tcatcactactgaaaagtagctgataac

SEQ ID NO: 1882 - DNA, 28 bp, Vibrio parahaemolyticus
  Vibrio parahaemolyticus CFSAN007462
gaatactgccgaacaggtaggaggctca

SEQ ID NO: 1883 - DNA, 31 bp, Vibrio parahaemolyticus; identical to SEQ ID NO: 1876
  Vibrio parahaemolyticus CFSAN007462

SEQ ID NO: 1884 - DNA, 31 bp, Vibrio parahaemolyticus; identical to SEQ ID NO: 1877
  Vibrio parahaemolyticus CFSAN007462

SEQ ID NO: 1885 - DNA, 31 bp, Vibrio parahaemolyticus; identical to SEQ ID NO: 1878
  Vibrio parahaemolyticus CFSAN007462

SEQ ID NO: 1886 - DNA, 28 bp, Vibrio parahaemolyticus
  Vibrio parahaemolyticus CFSAN006131
gtgaactgccgaataggtagctgataat

SEQ ID NO: 1887 - DNA, 28 bp, Vibrio parahaemolyticus
  Vibrio parahaemolyticus CFSAN006131
gtgaactgccgcataggtagagaggatc

SEQ ID NO: 1888 - DNA, 28 bp, Vibrio parahaemolyticus
  Vibrio parahaemolyticus CFSAN006131
tcatcactactgaaaagtagctgataac

SEQ ID NO: 1889 - DNA, 28 bp, Vibrio parahaemolyticus
  Vibrio parahaemolyticus CFSAN006131
gaatactgccgaacaggtaggaggctca

SEQ ID NO: 1890 - DNA, 31 bp, Vibrio parahaemolyticus; identical to SEQ ID NO: 1876
  Vibrio parahaemolyticus CFSAN006131

SEQ ID NO: 1891 - DNA, 31 bp, Vibrio parahaemolyticus; identical to SEQ ID NO: 1877
  Vibrio parahaemolyticus CFSAN006131

SEQ ID NO: 1892 - DNA, 31 bp, Vibrio parahaemolyticus; identical to SEQ ID NO: 1878
  Vibrio parahaemolyticus CFSAN006131

SEQ ID NO: 1893 - DNA, 28 bp, Vibrio parahaemolyticus
  Vibrio parahaemolyticus CFSAN007458
gtgaactgccgaataggtagctgataat

SEQ ID NO: 1894 - DNA, 28 bp, Vibrio parahaemolyticus
  Vibrio parahaemolyticus CFSAN007458
atgaactgccgaataggtagagaggagc

SEQ ID NO: 1895 - DNA, 28 bp, Vibrio parahaemolyticus
  Vibrio parahaemolyticus CFSAN007458
tcattactacttaaaagtagctgataac

SEQ ID NO: 1896 - DNA, 28 bp, Vibrio parahaemolyticus
  Vibrio parahaemolyticus CFSAN007458
gaatactgccgaacaggtaggaggctca

SEQ ID NO: 1897 - DNA, 31 bp, Vibrio parahaemolyticus
  Vibrio parahaemolyticus CFSAN007458
actacaacaagtaacaggaactgtttcacga

SEQ ID NO: 1898 - DNA, 31 bp, Vibrio parahaemolyticus; identical to SEQ ID NO: 1877
  Vibrio parahaemolyticus CFSAN007458

SEQ ID NO: 1899 - DNA, 31 bp, Vibrio parahaemolyticus; identical to SEQ ID NO: 1878
  Vibrio parahaemolyticus CFSAN007458

SEQ ID NO: 1900 - DNA, 28 bp, Vibrio parahaemolyticus
  Vibrio parahaemolyticus CFSAN007435
gtgaactgccgaataggtagctgataat

SEQ ID NO: 1901 - DNA, 28 bp, Vibrio parahaemolyticus
  Vibrio parahaemolyticus CFSAN007435
gtgaactgccgcataggtagagaggatc

SEQ ID NO: 1902 - DNA, 28 bp, Vibrio parahaemolyticus
  Vibrio parahaemolyticus CFSAN007435
tcatcactactgaaaagtagctgataac

SEQ ID NO: 1903 - DNA, 28 bp, Vibrio parahaemolyticus
  Vibrio parahaemolyticus CFSAN007435
gaatactgccgaacaggtaggaggctca

SEQ ID NO: 1904 - DNA, 31 bp, Vibrio parahaemolyticus; identical to SEQ ID NO: 1876
  Vibrio parahaemolyticus CFSAN007435

SEQ ID NO: 1905 - DNA, 31 bp, Vibrio parahaemolyticus; identical to SEQ ID NO: 1877
  Vibrio parahaemolyticus CFSAN007435

SEQ ID NO: 1906 - DNA, 31 bp, Vibrio parahaemolyticus; identical to SEQ ID NO: 1878
  Vibrio parahaemolyticus CFSAN007435

SEQ ID NO: 1907 - DNA, 28 bp, Vibrio parahaemolyticus
  Vibrio parahaemolyticus CFSAN007454
gtgaactgccgaataggtagctgataat

SEQ ID NO: 1908 - DNA, 28 bp, Vibrio parahaemolyticus
  Vibrio parahaemolyticus CFSAN007454
atgaactgccgaataggtagagaggagc

SEQ ID NO: 1909 - DNA, 28 bp, Vibrio parahaemolyticus
  Vibrio parahaemolyticus CFSAN007454
tcattactacttaaaagtagctgataac

SEQ ID NO: 1910 - DNA, 28 bp, Vibrio parahaemolyticus
  Vibrio parahaemolyticus CFSAN007454
gaatactgccgaacaggtaggaggctca

SEQ ID NO: 1911 - DNA, 31 bp, Vibrio parahaemolyticus; identical to SEQ ID NO: 1897
  Vibrio parahaemolyticus CFSAN007454

SEQ ID NO: 1912 - DNA, 31 bp, Vibrio parahaemolyticus; identical to SEQ ID NO: 1877
  Vibrio parahaemolyticus CFSAN007454

SEQ ID NO: 1913 - DNA, 31 bp, Vibrio parahaemolyticus; identical to SEQ ID NO: 1878
  Vibrio parahaemolyticus CFSAN007454

SEQ ID NO: 1914 - DNA, 28 bp, Vibrio parahaemolyticus
  Vibrio parahaemolyticus EN9701173
gtgaactgccgaataggtagctgataat

SEQ ID NO: 1915 - DNA, 28 bp, Vibrio parahaemolyticus
  Vibrio parahaemolyticus EN9701173
gtgaactgccgcataggtagagaggatc

SEQ ID NO: 1916 - DNA, 28 bp, Vibrio parahaemolyticus
  Vibrio parahaemolyticus EN9701173
tcatcactactgaaaagtagctgataac

SEQ ID NO: 1917 - DNA, 28 bp, Vibrio parahaemolyticus
  Vibrio parahaemolyticus EN9701173
gaatactgccgaacaggtaggaggctca

SEQ ID NO: 1918 - DNA, 31 bp, Vibrio parahaemolyticus; identical to SEQ ID NO: 1876
  Vibrio parahaemolyticus EN9701173

SEQ ID NO: 1919 - DNA, 31 bp, Vibrio parahaemolyticus; identical to SEQ ID NO: 1877
  Vibrio parahaemolyticus EN9701173

SEQ ID NO: 1920 - DNA, 31 bp, Vibrio parahaemolyticus; identical to SEQ ID NO: 1878
  Vibrio parahaemolyticus EN9701173

SEQ ID NO: 1921 - DNA, 28 bp, Vibrio parahaemolyticus
  Vibrio parahaemolyticus EN9901310
gtgaactgccgaataggtagctgataat

SEQ ID NO: 1922 - DNA, 28 bp, Vibrio parahaemolyticus
  Vibrio parahaemolyticus EN9901310
gtgaactgccgcataggtagagaggatc

SEQ ID NO: 1923 - DNA, 28 bp, Vibrio parahaemolyticus
  Vibrio parahaemolyticus EN9901310
tcatcactactgaaaagtagctgataac

SEQ ID NO: 1924 - DNA, 28 bp, Vibrio parahaemolyticus
  Vibrio parahaemolyticus EN9901310
gaatactgccgaacaggtaggaggctca

SEQ ID NO: 1925 - DNA, 31 bp, Vibrio parahaemolyticus; identical to SEQ ID NO: 1876
  Vibrio parahaemolyticus EN9901310

SEQ ID NO: 1926 - DNA, 31 bp, Vibrio parahaemolyticus; identical to SEQ ID NO: 1877
  Vibrio parahaemolyticus EN9901310

SEQ ID NO: 1927 - DNA, 31 bp, Vibrio parahaemolyticus; identical to SEQ ID NO: 1878
  Vibrio parahaemolyticus EN9901310

SEQ ID NO: 1928 - DNA, 28 bp, Vibrio parahaemolyticus
  Vibrio parahaemolyticus 856769
gtgaactgccgaataggtagctgataat

SEQ ID NO: 1929 - DNA, 28 bp, Vibrio parahaemolyticus
  Vibrio parahaemolyticus 856769
gtgaactgccgcataggtagagaggatc

SEQ ID NO: 1930 - DNA, 28 bp, Vibrio parahaemolyticus
  Vibrio parahaemolyticus 856769
tcatcactactgaaaagtagctgataac

SEQ ID NO: 1931 - DNA, 28 bp, Vibrio parahaemolyticus
  Vibrio parahaemolyticus 856769
gaatactgccgaacaggtaggaggctca

SEQ ID NO: 1932 - DNA, 31 bp, Vibrio parahaemolyticus; identical to SEQ ID NO: 1876
  Vibrio parahaemolyticus 856769

SEQ ID NO: 1933 - DNA, 31 bp, Vibrio parahaemolyticus; identical to SEQ ID NO: 1877
  Vibrio parahaemolyticus 856769

SEQ ID NO: 1934 - DNA, 31 bp, Vibrio parahaemolyticus; identical to SEQ ID NO: 1878
  Vibrio parahaemolyticus 856769

SEQ ID NO: 1935 - DNA, 28 bp, Vibrio parahaemolyticus
  Vibrio parahaemolyticus 867361
gtgaactgccgaataggtagctgataat

SEQ ID NO: 1936 - DNA, 28 bp, Vibrio parahaemolyticus
  Vibrio parahaemolyticus 867361
gtgaactgccgcataggtagagaggatc

SEQ ID NO: 1937 - DNA, 28 bp, Vibrio parahaemolyticus
  Vibrio parahaemolyticus 867361
tcatcactactgaaaagtagctgataac

SEQ ID NO: 1938 - DNA, 28 bp, Vibrio parahaemolyticus
  Vibrio parahaemolyticus 867361
gaatactgccgaacaggtaggaggctca

SEQ ID NO: 1939 - DNA, 31 bp, Vibrio parahaemolyticus; identical to SEQ ID NO: 1876
  Vibrio parahaemolyticus 867361

SEQ ID NO: 1940 - DNA, 31 bp, Vibrio parahaemolyticus; identical to SEQ ID NO: 1877
  Vibrio parahaemolyticus 867361

SEQ ID NO: 1941 - DNA, 31 bp, Vibrio parahaemolyticus; identical to SEQ ID NO: 1878
  Vibrio parahaemolyticus 867361

SEQ ID NO: 1942 - DNA, 28 bp, Vibrio parahaemolyticus
  Vibrio parahaemolyticus 858960
gtgaactgccgaataggtagctgataat

SEQ ID NO: 1943 - DNA, 28 bp, Vibrio parahaemolyticus
  Vibrio parahaemolyticus 858960
gtgaactgccgcataggtagagagaatc

SEQ ID NO: 1944 - DNA, 28 bp, Vibrio parahaemolyticus
  Vibrio parahaemolyticus 858960
tcattactactaaaaagtagctgataac

SEQ ID NO: 1945 - DNA, 28 bp, Vibrio parahaemolyticus
  Vibrio parahaemolyticus 858960
gaatactgccgaacaggtaggaggctca

SEQ ID NO: 1946 - DNA, 32 bp, Vibrio parahaemolyticus
  Vibrio parahaemolyticus 858960
gagataccacaagctcaagcagatgctaacag

SEQ ID NO: 1947 - DNA, 31 bp, Vibrio parahaemolyticus
  Vibrio parahaemolyticus 858960
agtcggtcaactgagaatacgttgttgccaa

SEQ ID NO: 1948 - DNA, 31 bp, Vibrio parahaemolyticus; identical to SEQ ID NO: 1877
  Vibrio parahaemolyticus 858960

SEQ ID NO: 1949 - DNA, 31 bp, Vibrio parahaemolyticus; identical to SEQ ID NO: 1878
  Vibrio parahaemolyticus 858960

SEQ ID NO: 1950 - DNA, 28 bp, Vibrio parahaemolyticus
  Vibrio parahaemolyticus HS-13-1
gtgaactgccgaataggtagctgataat

SEQ ID NO: 1951 - DNA, 28 bp, Vibrio parahaemolyticus
  Vibrio parahaemolyticus HS-13-1
atgaactgccgaataggtagagaggagc

SEQ ID NO: 1952 - DNA, 28 bp, Vibrio parahaemolyticus
  Vibrio parahaemolyticus HS-13-1
tcattactacttaaaagtagctgataac

SEQ ID NO: 1953 - DNA, 28 bp, Vibrio parahaemolyticus
  Vibrio parahaemolyticus HS-13-1
gaatactgccgaacaggtaggaggctca

SEQ ID NO: 1954 - DNA, 31 bp, Vibrio parahaemolyticus; identical to SEQ ID NO: 1897
  Vibrio parahaemolyticus HS-13-1

SEQ ID NO: 1955 - DNA, 31 bp, Vibrio parahaemolyticus; identical to SEQ ID NO: 1877
  Vibrio parahaemolyticus HS-13-1

SEQ ID NO: 1956 - DNA, 31 bp, Vibrio parahaemolyticus; identical to SEQ ID NO: 1878
  Vibrio parahaemolyticus HS-13-1

SEQ ID NO: 1957 - DNA, 28 bp, Vibrio parahaemolyticus
  Vibrio parahaemolyticus S499-7
gtgaactgccgaataggtagctgataat

SEQ ID NO: 1958 - DNA, 28 bp, Vibrio parahaemolyticus
  Vibrio parahaemolyticus S499-7
atgaactgccgaataggtagagaggagc

SEQ ID NO: 1959 - DNA, 28 bp, Vibrio parahaemolyticus
  Vibrio parahaemolyticus S499-7
tcattactacttaaaagtagctgataac

SEQ ID NO: 1960 - DNA, 28 bp, Vibrio parahaemolyticus
  Vibrio parahaemolyticus S499-7
gaatactgccgaacaggtaggaggctca

SEQ ID NO: 1961 - DNA, 31 bp, Vibrio parahaemolyticus; identical to SEQ ID NO: 1897
  Vibrio parahaemolyticus S499-7

SEQ ID NO: 1962 - DNA, 31 bp, Vibrio parahaemolyticus; identical to SEQ ID NO: 1877
  Vibrio parahaemolyticus S499-7

SEQ ID NO: 1963 - DNA, 31 bp, Vibrio parahaemolyticus; identical to SEQ ID NO: 1878
  Vibrio parahaemolyticus S499-7

SEQ ID NO: 1964 - DNA, 28 bp, Vibrio parahaemolyticus
  Vibrio parahaemolyticus FDAARGOS_120
gtgaactgccgaataggtagctgataat

SEQ ID NO: 1965 - DNA, 28 bp, Vibrio parahaemolyticus
  Vibrio parahaemolyticus FDAARGOS_120
gtgaactgccgcataggtagagaggatc

SEQ ID NO: 1966 - DNA, 28 bp, Vibrio parahaemolyticus
  Vibrio parahaemolyticus FDAARGOS_120
tcatcactactgaaaagtagctgataac

SEQ ID NO: 1967 - DNA, 28 bp, Vibrio parahaemolyticus
  Vibrio parahaemolyticus FDAARGOS_120
gaatactgccgaacaggtaggaggctca

SEQ ID NO: 1968 - DNA, 31 bp, Vibrio parahaemolyticus; identical to SEQ ID NO: 1876
  Vibrio parahaemolyticus FDAARGOS_120

SEQ ID NO: 1969 - DNA, 31 bp, Vibrio parahaemolyticus; identical to SEQ ID NO: 1877
  Vibrio parahaemolyticus FDAARGOS_120

SEQ ID NO: 1970 - DNA, 31 bp, Vibrio parahaemolyticus
  Vibrio parahaemolyticus FDAARGOS_120
aaattaacgtcgccaggttctgctaaaaaac

SEQ ID NO: 1971 - DNA, 28 bp, Vibrio parahaemolyticus
  Vibrio parahaemolyticus A4EZ927
gtgaactgccgaataggtagctgataat

SEQ ID NO: 1972 - DNA, 28 bp, Vibrio parahaemolyticus
  Vibrio parahaemolyticus A4EZ927
gtgaactgccgcataggtagagagaatc

SEQ ID NO: 1973 - DNA, 28 bp, Vibrio parahaemolyticus
  Vibrio parahaemolyticus A4EZ927
tcattactactaaaaagtagctgataac

SEQ ID NO: 1974 - DNA, 28 bp, Vibrio parahaemolyticus
  Vibrio parahaemolyticus A4EZ927
gaatactgccgaacaggtaggaggctca

SEQ ID NO: 1975 - DNA, 32 bp, Vibrio parahaemolyticus; identical to SEQ ID NO: 1946
  Vibrio parahaemolyticus A4EZ927

SEQ ID NO: 1976 - DNA, 31 bp, Vibrio parahaemolyticus; identical to SEQ ID NO: 1947
  Vibrio parahaemolyticus A4EZ927

SEQ ID NO: 1977 - DNA, 31 bp, Vibrio parahaemolyticus; identical to SEQ ID NO: 1877
  Vibrio parahaemolyticus A4EZ927

SEQ ID NO: 1978 - DNA, 31 bp, Vibrio parahaemolyticus; identical to SEQ ID NO: 1878
  Vibrio parahaemolyticus A4EZ927

SEQ ID NO: 1979 - DNA, 28 bp, Vibrio parahaemolyticus
  Vibrio parahaemolyticus A4EZ724
gtgaactgccgaataggtagctgataat

SEQ ID NO: 1980 - DNA, 28 bp, Vibrio parahaemolyticus
  Vibrio parahaemolyticus A4EZ724
gtgaactgccgcataggtagagaggatc

SEQ ID NO: 1981 - DNA, 28 bp, Vibrio parahaemolyticus
  Vibrio parahaemolyticus A4EZ724
tcatcactactgaaaagtagctgataac

SEQ ID NO: 1982 - DNA, 28 bp, Vibrio parahaemolyticus
  Vibrio parahaemolyticus A4EZ724
gaatactgccgaacaggtaggaggctca

SEQ ID NO: 1983 - DNA, 31 bp, Vibrio parahaemolyticus; identical to SEQ ID NO: 1876
  Vibrio parahaemolyticus A4EZ724

SEQ ID NO: 1984 - DNA, 31 bp, Vibrio parahaemolyticus; identical to SEQ ID NO: 1877
  Vibrio parahaemolyticus A4EZ724

SEQ ID NO: 1985 - DNA, 31 bp, Vibrio parahaemolyticus; identical to SEQ ID NO: 1970
  Vibrio parahaemolyticus A4EZ724

SEQ ID NO: 1986 - DNA, 28 bp, Vibrio parahaemolyticus
  Vibrio parahaemolyticus A2EZ614
gtgaactgccgaataggtagctgataat

SEQ ID NO: 1987 - DNA, 28 bp, Vibrio parahaemolyticus
  Vibrio parahaemolyticus A2EZ614
gtgaactgccgcataggtagagaggatc

SEQ ID NO: 1988 - DNA, 28 bp, Vibrio parahaemolyticus
  Vibrio parahaemolyticus A2EZ614
tcatcactactgaaaagtagctgataac

SEQ ID NO: 1989 - DNA, 28 bp, Vibrio parahaemolyticus
  Vibrio parahaemolyticus A2EZ614
gaatactgccgaacaggtaggaggctca

SEQ ID NO: 1990 - DNA, 31 bp, Vibrio parahaemolyticus; identical to SEQ ID NO: 1876
  Vibrio parahaemolyticus A2EZ614

SEQ ID NO: 1991 - DNA, 31 bp, Vibrio parahaemolyticus; identical to SEQ ID NO: 1877
  Vibrio parahaemolyticus A2EZ614

SEQ ID NO: 1992 - DNA, 31 bp, Vibrio parahaemolyticus; identical to SEQ ID NO: 1970
  Vibrio parahaemolyticus A2EZ614

SEQ ID NO: 1993 - DNA, 28 bp, Vibrio parahaemolyticus
  Vibrio parahaemolyticus A2EZ743
gtgaactgccgaataggtagctgataat

SEQ ID NO: 1994 - DNA, 28 bp, Vibrio parahaemolyticus
  Vibrio parahaemolyticus A2EZ743
atgaactgccgaataggtagagaggagc

SEQ ID NO: 1995 - DNA, 28 bp, Vibrio parahaemolyticus
  Vibrio parahaemolyticus A2EZ743
tcattactacttaaaagtagctgataac

SEQ ID NO: 1996 - DNA, 28 bp, Vibrio parahaemolyticus
  Vibrio parahaemolyticus A2EZ743
gaatactgccgaacaggtaggaggctca

SEQ ID NO: 1997 - DNA, 31 bp, Vibrio parahaemolyticus; identical to SEQ ID NO: 1897
  Vibrio parahaemolyticus A2EZ743

SEQ ID NO: 1998 - DNA, 31 bp, Vibrio parahaemolyticus; identical to SEQ ID NO: 1877
  Vibrio parahaemolyticus A2EZ743

SEQ ID NO: 1999 - DNA, 31 bp, Vibrio parahaemolyticus; identical to SEQ ID NO: 1878
  Vibrio parahaemolyticus A2EZ743

SEQ ID NO: 2000 - DNA, 28 bp, Vibrio parahaemolyticus
  Vibrio parahaemolyticus A2EZ523
gtgaactgccgaataggtagctgataat

SEQ ID NO: 2001 - DNA, 28 bp, Vibrio parahaemolyticus
  Vibrio parahaemolyticus A2EZ523
gtgaactgccgcataggtagagaggatc

SEQ ID NO: 2002 - DNA, 28 bp, Vibrio parahaemolyticus
  Vibrio parahaemolyticus A2EZ523
tcatcactactgaaaagtagctgataac

SEQ ID NO: 2003 - DNA, 28 bp, Vibrio parahaemolyticus
  Vibrio parahaemolyticus A2EZ523
gaatactgccgaacaggtaggaggctca

SEQ ID NO: 2004 - DNA, 31 bp, Vibrio parahaemolyticus; identical to SEQ ID NO: 1876
  Vibrio parahaemolyticus A2EZ523

SEQ ID NO: 2005 - DNA, 31 bp, Vibrio parahaemolyticus; identical to SEQ ID NO: 1877
  Vibrio parahaemolyticus A2EZ523

SEQ ID NO: 2006 - DNA, 31 bp, Vibrio parahaemolyticus; identical to SEQ ID NO: 1878
  Vibrio parahaemolyticus A2EZ523

SEQ ID NO: 2007 - DNA, 28 bp, Vibrio parahaemolyticus
  Vibrio parahaemolyticus A3EZ634
gtgaactgccgaataggtagctgataat

SEQ ID NO: 2008 - DNA, 28 bp, Vibrio parahaemolyticus
  Vibrio parahaemolyticus A3EZ634
gtgaactgccgcataggtagagaggatc

SEQ ID NO: 2009 - DNA, 28 bp, Vibrio parahaemolyticus
  Vibrio parahaemolyticus A3EZ634
tcatcactactgaaaagtagctgataac

SEQ ID NO: 2010 - DNA, 28 bp, Vibrio parahaemolyticus
  Vibrio parahaemolyticus A3EZ634
gaatactgccgaacaggtaggaggctca

SEQ ID NO: 2011 - DNA, 31 bp, Vibrio parahaemolyticus; identical to SEQ ID NO: 1876
  Vibrio parahaemolyticus A3EZ634

SEQ ID NO: 2012 - DNA, 31 bp, Vibrio parahaemolyticus; identical to SEQ ID NO: 1877
  Vibrio parahaemolyticus A3EZ634

SEQ ID NO: 2013 - DNA, 31 bp, Vibrio parahaemolyticus; identical to SEQ ID NO: 1970
  Vibrio parahaemolyticus A3EZ634

SEQ ID NO: 2014 - DNA, 28 bp, Vibrio parahaemolyticus
  Vibrio parahaemolyticus 106744
gtgaactgccgaataggtagctgataat

SEQ ID NO: 2015 - DNA, 28 bp, Vibrio parahaemolyticus
  Vibrio parahaemolyticus 106744
gtgaactgccgcataggtagagaggatc

SEQ ID NO: 2016 - DNA, 28 bp, Vibrio parahaemolyticus
  Vibrio parahaemolyticus 106744
tcatcactacttaaaagtagctgataac

SEQ ID NO: 2017 - DNA, 28 bp, Vibrio parahaemolyticus
  Vibrio parahaemolyticus 106744
gaatactgccgaacaggtaggaggctca

SEQ ID NO: 2018 - DNA, 31 bp, Vibrio parahaemolyticus
  Vibrio parahaemolyticus 106744
tcattctcacgatctaattacagttggtcac

SEQ ID NO: 2019 - DNA, 31 bp, Vibrio parahaemolyticus; identical to SEQ ID NO: 1947
  Vibrio parahaemolyticus 106744

SEQ ID NO: 2020 - DNA, 31 bp, Vibrio parahaemolyticus; identical to SEQ ID NO: 1877
  Vibrio parahaemolyticus 106744

SEQ ID NO: 2021 - DNA, 31 bp, Vibrio parahaemolyticus; identical to SEQ ID NO: 1970
  Vibrio parahaemolyticus 106744

SEQ ID NO: 2022 - DNA, 28 bp, Vibrio parahaemolyticus
  Vibrio parahaemolyticus A5Z273
gtgaactgccgaataggtagctgataat

SEQ ID NO: 2023 - DNA, 28 bp, Vibrio parahaemolyticus
  Vibrio parahaemolyticus A5Z273
gtgaactgccgcataggtagagagaatc

SEQ ID NO: 2024 - DNA, 28 bp, Vibrio parahaemolyticus
  Vibrio parahaemolyticus A5Z273
tcattactactaaaaagtagctgataac

SEQ ID NO: 2025 - DNA, 28 bp, Vibrio parahaemolyticus
  Vibrio parahaemolyticus A5Z273
gaatactgccgaacaggtaggaggctca

SEQ ID NO: 2026 - DNA, 32 bp, Vibrio parahaemolyticus; identical to SEQ ID NO: 1946
  Vibrio parahaemolyticus A5Z273

SEQ ID NO: 2027 - DNA, 31 bp, Vibrio parahaemolyticus; identical to SEQ ID NO: 1947
  Vibrio parahaemolyticus A5Z273

SEQ ID NO: 2028 - DNA, 31 bp, Vibrio parahaemolyticus; identical to SEQ ID NO: 1877
  Vibrio parahaemolyticus A5Z273

SEQ ID NO: 2029 - DNA, 31 bp, Vibrio parahaemolyticus; identical to SEQ ID NO: 1878
  Vibrio parahaemolyticus A5Z273

SEQ ID NO: 2030 - DNA, 28 bp, Vibrio parahaemolyticus
  Vibrio parahaemolyticus CFSAN025067
gtgaactgccgaataggtagctgataat

SEQ ID NO: 2031 - DNA, 28 bp, Vibrio parahaemolyticus
  Vibrio parahaemolyticus CFSAN025067
gtgaactgccgcataggtagagagaatc

SEQ ID NO: 2032 - DNA, 28 bp, Vibrio parahaemolyticus
  Vibrio parahaemolyticus CFSAN025067
tcattactactaaaaagtagctgataac

SEQ ID NO: 2033 - DNA, 28 bp, Vibrio parahaemolyticus
  Vibrio parahaemolyticus CFSAN025067
gaatactgccgaacaggtaggaggctca

SEQ ID NO: 2034 - DNA, 32 bp, Vibrio parahaemolyticus
  Vibrio parahaemolyticus CFSAN025067
ttgttggctcagtgagttttacccctgacatg

SEQ ID NO: 2035 - DNA, 32 bp, Vibrio parahaemolyticus
  Vibrio parahaemolyticus CFSAN025067
gagataccacaggctcaagcagatgctaacag

SEQ ID NO: 2036 - DNA, 31 bp, Vibrio parahaemolyticus; identical to SEQ ID NO: 1947
  Vibrio parahaemolyticus CFSAN025067

SEQ ID NO: 2037 - DNA, 31 bp, Vibrio parahaemolyticus; identical to SEQ ID NO: 1877
  Vibrio parahaemolyticus CFSAN025067

SEQ ID NO: 2038 - DNA, 31 bp, Vibrio parahaemolyticus
  Vibrio parahaemolyticus CFSAN025067
aaattaacgtcgctaggttctgctaaaaaac

SEQ ID NO: 2039 - DNA, 28 bp, Vibrio parahaemolyticus
  Vibrio parahaemolyticus CFSAN025068
gtgaactgccgaataggtagctgataat

SEQ ID NO: 2040 - DNA, 28 bp, Vibrio parahaemolyticus
  Vibrio parahaemolyticus CFSAN025068
gtgaactgccgcataggtagagagaatc

SEQ ID NO: 2041 - DNA, 28 bp, Vibrio parahaemolyticus
  Vibrio parahaemolyticus CFSAN025068
tcattactactaaaaagtagctgataac

SEQ ID NO: 2042 - DNA, 28 bp, Vibrio parahaemolyticus
  Vibrio parahaemolyticus CFSAN025068
gaatactgccgaacaggtaggaggctca

SEQ ID NO: 2043 - DNA, 32 bp, Vibrio parahaemolyticus; identical to SEQ ID NO: 2034
  Vibrio parahaemolyticus CFSAN025068

SEQ ID NO: 2044 - DNA, 32 bp, Vibrio parahaemolyticus; identical to SEQ ID NO: 2035
  Vibrio parahaemolyticus CFSAN025068

SEQ ID NO: 2045 - DNA, 31 bp, Vibrio parahaemolyticus; identical to SEQ ID NO: 1947
  Vibrio parahaemolyticus CFSAN025068

SEQ ID NO: 2046 - DNA, 31 bp, Vibrio parahaemolyticus; identical to SEQ ID NO: 1877
  Vibrio parahaemolyticus CFSAN025068

SEQ ID NO: 2047 - DNA, 31 bp, Vibrio parahaemolyticus; identical to SEQ ID NO: 2038
  Vibrio parahaemolyticus CFSAN025068

SEQ ID NO: 2048 - DNA, 28 bp, Vibrio parahaemolyticus
  Vibrio parahaemolyticus CFSAN025058
gtgaactgccgaataggtagctgataat

SEQ ID NO: 2049 - DNA, 28 bp, Vibrio parahaemolyticus
  Vibrio parahaemolyticus CFSAN025058
gtgaactgccgcataggtagagagaatc

SEQ ID NO: 2050 - DNA, 28 bp, Vibrio parahaemolyticus
  Vibrio parahaemolyticus CFSAN025058
tcattactactaaaaagtagctgataac

SEQ ID NO: 2051 - DNA, 28 bp, Vibrio parahaemolyticus
  Vibrio parahaemolyticus CFSAN025058
gaatactgccgaacaggtaggaggctca

SEQ ID NO: 2052 - DNA, 32 bp, Vibrio parahaemolyticus; identical to SEQ ID NO: 2034
  Vibrio parahaemolyticus CFSAN025058

SEQ ID NO: 2053 - DNA, 32 bp, Vibrio parahaemolyticus; identical to SEQ ID NO: 2035
  Vibrio parahaemolyticus CFSAN025058

SEQ ID NO: 2054 - DNA, 31 bp, Vibrio parahaemolyticus; identical to SEQ ID NO: 1947
  Vibrio parahaemolyticus CFSAN025058

SEQ ID NO: 2055 - DNA, 31 bp, Vibrio parahaemolyticus; identical to SEQ ID NO: 1877
  Vibrio parahaemolyticus CFSAN025058

SEQ ID NO: 2056 - DNA, 31 bp, Vibrio parahaemolyticus; identical to SEQ ID NO: 2038
  Vibrio parahaemolyticus CFSAN025058

SEQ ID NO: 2057 - DNA, 28 bp, Vibrio parahaemolyticus
  Vibrio parahaemolyticus CFSAN025061
gtgaactgccgaataggtagctgataat

SEQ ID NO: 2058 - DNA, 28 bp, Vibrio parahaemolyticus
  Vibrio parahaemolyticus CFSAN025061
gtgaactgccgcataggtagagagaatc

SEQ ID NO: 2059 - DNA, 28 bp, Vibrio parahaemolyticus
  Vibrio parahaemolyticus CFSAN025061
tcattactactaaaaagtagctgataac

SEQ ID NO: 2060 - DNA, 28 bp, Vibrio parahaemolyticus
  Vibrio parahaemolyticus CFSAN025061
gaatactgccgaacaggtaggaggctca

SEQ ID NO: 2061 - DNA, 32 bp, Vibrio parahaemolyticus; identical to SEQ ID NO: 2034
  Vibrio parahaemolyticus CFSAN025061

SEQ ID NO: 2062 - DNA, 32 bp, Vibrio parahaemolyticus; identical to SEQ ID NO: 2035
  Vibrio parahaemolyticus CFSAN025061

SEQ ID NO: 2063 - DNA, 31 bp, Vibrio parahaemolyticus; identical to SEQ ID NO: 1947
  Vibrio parahaemolyticus CFSAN025061

SEQ ID NO: 2064 - DNA, 31 bp, Vibrio parahaemolyticus; identical to SEQ ID NO: 1877
  Vibrio parahaemolyticus CFSAN025061

SEQ ID NO: 2065 - DNA, 31 bp, Vibrio parahaemolyticus; identical to SEQ ID NO: 2038
  Vibrio parahaemolyticus CFSAN025061

SEQ ID NO: 2066 - DNA, 28 bp, Vibrio parahaemolyticus
  Vibrio parahaemolyticus GCSL_R26
gtgaactgccgaataggtagctgataat

SEQ ID NO: 2067 - DNA, 28 bp, Vibrio parahaemolyticus
  Vibrio parahaemolyticus GCSL_R26
atgaactgccgaataggtagagaggagc

SEQ ID NO: 2068 - DNA, 28 bp, Vibrio parahaemolyticus
  Vibrio parahaemolyticus GCSL_R26
tcattactacttaaaagtagctgataac

SEQ ID NO: 2069 - DNA, 28 bp, Vibrio parahaemolyticus
  Vibrio parahaemolyticus GCSL_R26
gaatactgccgaacaggtaggaggctca

SEQ ID NO: 2070 - DNA, 31 bp, Vibrio parahaemolyticus; identical to SEQ ID NO: 1897
  Vibrio parahaemolyticus GCSL_R26

SEQ ID NO: 2071 - DNA, 31 bp, Vibrio parahaemolyticus; identical to SEQ ID NO: 1877
  Vibrio parahaemolyticus GCSL_R26

SEQ ID NO: 2072 - DNA, 31 bp, Vibrio parahaemolyticus; identical to SEQ ID NO: 1878
  Vibrio parahaemolyticus GCSL_R26

SEQ ID NO: 2073 - DNA, 28 bp, Vibrio parahaemolyticus
  Vibrio parahaemolyticus GCSL_R75
gtgaactgccgaataggtagctgataat

SEQ ID NO: 2074 - DNA, 28 bp, Vibrio parahaemolyticus
  Vibrio parahaemolyticus GCSL_R75
atgaactgccgaataggtagagaggagc

SEQ ID NO: 2075 - DNA, 28 bp, Vibrio parahaemolyticus
  Vibrio parahaemolyticus GCSL_R75
tcattactacttaaaagtagctgataac

SEQ ID NO: 2076 - DNA, 28 bp, Vibrio parahaemolyticus
  Vibrio parahaemolyticus GCSL_R75
gaatactgccgaacaggtaggaggctca

SEQ ID NO: 2077 - DNA, 31 bp, Vibrio parahaemolyticus; identical to SEQ ID NO: 1897
  Vibrio parahaemolyticus GCSL_R75

SEQ ID NO: 2078 - DNA, 31 bp, Vibrio parahaemolyticus; identical to SEQ ID NO: 1877
  Vibrio parahaemolyticus GCSL_R75

SEQ ID NO: 2079 - DNA, 31 bp, Vibrio parahaemolyticus; identical to SEQ ID NO: 1878
  Vibrio parahaemolyticus GCSL_R75

SEQ ID NO: 2080 - DNA, 28 bp, Vibrio parahaemolyticus
  Vibrio parahaemolyticus GCSL_R145
gtgaactgccgaataggtagctgataat

SEQ ID NO: 2081 - DNA, 28 bp, Vibrio parahaemolyticus
  Vibrio parahaemolyticus GCSL_R145
atgaactgccgaataggtagagaggagc

SEQ ID NO: 2082 - DNA, 28 bp, Vibrio parahaemolyticus
  Vibrio parahaemolyticus GCSL_R145
tcattactacttaaaagtagctgataac

SEQ ID NO: 2083 - DNA, 28 bp, Vibrio parahaemolyticus
  Vibrio parahaemolyticus GCSL_R145
gaatactgccgaacaggtaggaggctca

SEQ ID NO: 2084 - DNA, 31 bp, Vibrio parahaemolyticus; identical to SEQ ID NO: 1897
  Vibrio parahaemolyticus GCSL_R145

SEQ ID NO: 2085 - DNA, 31 bp, Vibrio parahaemolyticus; identical to SEQ ID NO: 1877
  Vibrio parahaemolyticus GCSL_R145

SEQ ID NO: 2086 - DNA, 31 bp, Vibrio parahaemolyticus; identical to SEQ ID NO: 1970
  Vibrio parahaemolyticus GCSL_R145

SEQ ID NO: 2087 - DNA, 28 bp, Vibrio parahaemolyticus
  Vibrio parahaemolyticus CDC_K5428
gtgaactgccgaataggtagctgataat

SEQ ID NO: 2088 - DNA, 28 bp, Vibrio parahaemolyticus
  Vibrio parahaemolyticus CDC_K5428
atgaactgccgaataggtagagaggagc

SEQ ID NO: 2089 - DNA, 28 bp, Vibrio parahaemolyticus
  Vibrio parahaemolyticus CDC_K5428
tcattactacttaaaagtagctgataac

SEQ ID NO: 2090 - DNA, 28 bp, Vibrio parahaemolyticus
  Vibrio parahaemolyticus CDC_K5428
gaatactgccgaacaggtaggaggctca

SEQ ID NO: 2091 - DNA, 31 bp, Vibrio parahaemolyticus; identical to SEQ ID NO: 1897
  Vibrio parahaemolyticus CDC_K5428

SEQ ID NO: 2092 - DNA, 31 bp, Vibrio parahaemolyticus; identical to SEQ ID NO: 1877
  Vibrio parahaemolyticus CDC_K5428

SEQ ID NO: 2093 - DNA, 31 bp, Vibrio parahaemolyticus; identical to SEQ ID NO: 1878
  Vibrio parahaemolyticus CDC_K5428

SEQ ID NO: 2094 - DNA, 28 bp, Vibrio parahaemolyticus
  Vibrio parahaemolyticus CDC_K5328
gtgaactgccgaataggtagctgataat

SEQ ID NO: 2095 - DNA, 28 bp, Vibrio parahaemolyticus
  Vibrio parahaemolyticus CDC_K5328
gtgaactgccgcataggtagagaggatc

SEQ ID NO: 2096 - DNA, 28 bp, Vibrio parahaemolyticus
  Vibrio parahaemolyticus CDC_K5328
tcatcactactgaaaagtagctgataac

SEQ ID NO: 2097 - DNA, 28 bp, Vibrio parahaemolyticus
  Vibrio parahaemolyticus CDC_K5328
gaatactgccgaacaggtaggaggctca

SEQ ID NO: 2098 - DNA, 31 bp, Vibrio parahaemolyticus; identical to SEQ ID NO: 1876
  Vibrio parahaemolyticus CDC_K5328

SEQ ID NO: 2099 - DNA, 31 bp, Vibrio parahaemolyticus; identical to SEQ ID NO: 1877
  Vibrio parahaemolyticus CDC_K5328

SEQ ID NO: 2100 - DNA, 31 bp, Vibrio parahaemolyticus; identical to SEQ ID NO: 1878
  Vibrio parahaemolyticus CDC_K5328

SEQ ID NO: 2101 - DNA, 28 bp, Vibrio parahaemolyticus
  Vibrio parahaemolyticus CDC_K5010G
gtgaactgccgaataggtagctgataat

SEQ ID NO: 2102 - DNA, 28 bp, Vibrio parahaemolyticus
  Vibrio parahaemolyticus CDC_K5010G
gtgaactgccgcataggtagagagaatc

SEQ ID NO: 2103 - DNA, 28 bp, Vibrio parahaemolyticus
  Vibrio parahaemolyticus CDC_K5010G
tcattactactaaaaagtagctgataac

SEQ ID NO: 2104 - DNA, 28 bp, Vibrio parahaemolyticus
  Vibrio parahaemolyticus CDC_K5010G
gaatactgccgaacaggtaggaggctca

SEQ ID NO: 2105 - DNA, 32 bp, Vibrio parahaemolyticus; identical to SEQ ID NO: 1946
  Vibrio parahaemolyticus CDC_K5010G

SEQ ID NO: 2106 - DNA, 31 bp, Vibrio parahaemolyticus; identical to SEQ ID NO: 1947
  Vibrio parahaemolyticus CDC_K5010G

SEQ ID NO: 2107 - DNA, 31 bp, Vibrio parahaemolyticus; identical to SEQ ID NO: 1877
  Vibrio parahaemolyticus CDC_K5010G

SEQ ID NO: 2108 - DNA, 31 bp, Vibrio parahaemolyticus; identical to SEQ ID NO: 1878
  Vibrio parahaemolyticus CDC_K5010G

SEQ ID NO: 2109 - DNA, 28 bp, Vibrio parahaemolyticus
  Vibrio parahaemolyticus CDC_K5010W
gtgaactgccgaataggtagctgataat

SEQ ID NO: 2110 - DNA, 28 bp, Vibrio parahaemolyticus
  Vibrio parahaemolyticus CDC_K5010W
gtgaactgccgcataggtagagagaatc

SEQ ID NO: 2111 - DNA, 28 bp, Vibrio parahaemolyticus
  Vibrio parahaemolyticus CDC_K5010W
tcattactactaaaaagtagctgataac

SEQ ID NO: 2112 - DNA, 28 bp, Vibrio parahaemolyticus
  Vibrio parahaemolyticus CDC_K5010W
gaatactgccgaacaggtaggaggctca

SEQ ID NO: 2113 - DNA, 32 bp, Vibrio parahaemolyticus; identical to SEQ ID NO: 1946
  Vibrio parahaemolyticus CDC_K5010W

SEQ ID NO: 2114 - DNA, 31 bp, Vibrio parahaemolyticus; identical to SEQ ID NO: 1947
  Vibrio parahaemolyticus CDC_K5010W

SEQ ID NO: 2115 - DNA, 31 bp, Vibrio parahaemolyticus; identical to SEQ ID NO: 1877
  Vibrio parahaemolyticus CDC_K5010W

SEQ ID NO: 2116 - DNA, 31 bp, Vibrio parahaemolyticus; identical to SEQ ID NO: 1878
  Vibrio parahaemolyticus CDC_K5010W

SEQ ID NO: 2117 - DNA, 28 bp, Vibrio parahaemolyticus
  Vibrio parahaemolyticus CDC_K5439
gtgaactgccgaataggtagctgataat

SEQ ID NO: 2118 - DNA, 28 bp, Vibrio parahaemolyticus
  Vibrio parahaemolyticus CDC_K5439
gtgaactgccgcataggtagagagaatc

SEQ ID NO: 2119 - DNA, 28 bp, Vibrio parahaemolyticus
  Vibrio parahaemolyticus CDC_K5439
tcattactactaaaaagtagctgataac

SEQ ID NO: 2120 - DNA, 28 bp, Vibrio parahaemolyticus
  Vibrio parahaemolyticus CDC_K5439
gaatactgccgaacaggtaggaggctca

SEQ ID NO: 2121 - DNA, 32 bp, Vibrio parahaemolyticus; identical to SEQ ID NO: 2035
  Vibrio parahaemolyticus CDC_K5439

SEQ ID NO: 2122 - DNA, 31 bp, Vibrio parahaemolyticus; identical to SEQ ID NO: 1947
  Vibrio parahaemolyticus CDC_K5439

SEQ ID NO: 2123 - DNA, 31 bp, Vibrio parahaemolyticus; identical to SEQ ID NO: 1877
  Vibrio parahaemolyticus CDC_K5439

SEQ ID NO: 2124 - DNA, 31 bp, Vibrio parahaemolyticus; identical to SEQ ID NO: 1878
  Vibrio parahaemolyticus CDC_K5439

SEQ ID NO: 2125 - DNA, 28 bp, Vibrio parahaemolyticus
  Vibrio parahaemolyticus CDC_K5457
gtgaactgccgaataggtagctgataat

SEQ ID NO: 2126 - DNA, 28 bp, Vibrio parahaemolyticus
  Vibrio parahaemolyticus CDC_K5457
gtgaactgccgcataggtagagaggatc

SEQ ID NO: 2127 - DNA, 28 bp, Vibrio parahaemolyticus
  Vibrio parahaemolyticus CDC_K5457
tcatcactactgaaaagtagctgataac

SEQ ID NO: 2128 - DNA, 28 bp, Vibrio parahaemolyticus
  Vibrio parahaemolyticus CDC_K5457
gaatactgccgaacaggtaggaggctca

SEQ ID NO: 2129 - DNA, 31 bp, Vibrio parahaemolyticus; identical to SEQ ID NO: 1876
  Vibrio parahaemolyticus CDC_K5457

SEQ ID NO: 2130 - DNA, 31 bp, Vibrio parahaemolyticus; identical to SEQ ID NO: 1877
  Vibrio parahaemolyticus CDC_K5457

SEQ ID NO: 2131 - DNA, 31 bp, Vibrio parahaemolyticus; identical to SEQ ID NO: 1878
  Vibrio parahaemolyticus CDC_K5457

SEQ ID NO: 2132 - DNA, 28 bp, Vibrio parahaemolyticus
  Vibrio parahaemolyticus CAIM 1772
gtgaactgccgaataggtagctgataat

SEQ ID NO: 2133 - DNA, 28 bp, Vibrio parahaemolyticus
  Vibrio parahaemolyticus CAIM 1772
atgaactgccgaataggtagagaggagc

SEQ ID NO: 2134 - DNA, 28 bp, Vibrio parahaemolyticus
  Vibrio parahaemolyticus CAIM 1772
tcattactacttaaaagtagctgataac

SEQ ID NO: 2135 - DNA, 28 bp, Vibrio parahaemolyticus
  Vibrio parahaemolyticus CAIM 1772
gaatactgccgaacaggtaggaggctca

SEQ ID NO: 2136 - DNA, 31 bp, Vibrio parahaemolyticus; identical to SEQ ID NO: 1897
  Vibrio parahaemolyticus CAIM 1772

SEQ ID NO: 2137 - DNA, 31 bp, Vibrio parahaemolyticus; identical to SEQ ID NO: 1877
  Vibrio parahaemolyticus CAIM 1772

SEQ ID NO: 2138 - DNA, 31 bp, Vibrio parahaemolyticus; identical to SEQ ID NO: 1970
  Vibrio parahaemolyticus CAIM 1772

SEQ ID NO: 2139 - DNA, 28 bp, Vibrio parahaemolyticus
  Vibrio parahaemolyticus PMA11.14
gtgaactgccgaataggtagctgataat

SEQ ID NO: 2140 - DNA, 28 bp, Vibrio parahaemolyticus
  Vibrio parahaemolyticus PMA11.14
gtgaactgccgcataggtagagaggatc

SEQ ID NO: 2141 - DNA, 28 bp, Vibrio parahaemolyticus
  Vibrio parahaemolyticus PMA11.14
tcatcactacttaaaagtagctgataac

SEQ ID NO: 2142 - DNA, 28 bp, Vibrio parahaemolyticus
  Vibrio parahaemolyticus PMA11.14
gaatactgccgaacaggtaggaggctca

SEQ ID NO: 2143 - DNA, 31 bp, Vibrio parahaemolyticus; identical to SEQ ID NO: 2018
  Vibrio parahaemolyticus PMA11.14

SEQ ID NO: 2144 - DNA, 31 bp, Vibrio parahaemolyticus; identical to SEQ ID NO: 1947
  Vibrio parahaemolyticus PMA11.14

SEQ ID NO: 2145 - DNA, 31 bp, Vibrio parahaemolyticus; identical to SEQ ID NO: 1877
  Vibrio parahaemolyticus PMA11.14

SEQ ID NO: 2146 - DNA, 31 bp, Vibrio parahaemolyticus
  Vibrio parahaemolyticus PMA11.14
aaattaacgtcgctaggttcagctaaaaaac

SEQ ID NO: 2147 - DNA, 28 bp, Vibrio parahaemolyticus
  Vibrio parahaemolyticus PMA32.14
gtgaactgccgaataggtagctgataat

SEQ ID NO: 2148 - DNA, 28 bp, Vibrio parahaemolyticus
  Vibrio parahaemolyticus PMA32.14
gtgaactgccgcataggtagagaggatc

SEQ ID NO: 2149 - DNA, 28 bp, Vibrio parahaemolyticus
  Vibrio parahaemolyticus PMA32.14
tcatcactacttaaaagtagctgataac

SEQ ID NO: 2150 - DNA, 28 bp, Vibrio parahaemolyticus
  Vibrio parahaemolyticus PMA32.14
gaatactgccgaacaggtaggaggctca

SEQ ID NO: 2151 - DNA, 31 bp, Vibrio parahaemolyticus; identical to SEQ ID NO: 2018
  Vibrio parahaemolyticus PMA32.14

SEQ ID NO: 2152 - DNA, 31 bp, Vibrio parahaemolyticus; identical to SEQ ID NO: 1947
  Vibrio parahaemolyticus PMA32.14

SEQ ID NO: 2153 - DNA, 31 bp, Vibrio parahaemolyticus; identical to SEQ ID NO: 1877
  Vibrio parahaemolyticus PMA32.14

SEQ ID NO: 2154 - DNA, 31 bp, Vibrio parahaemolyticus; identical to SEQ ID NO: 2146
  Vibrio parahaemolyticus PMA32.14

SEQ ID NO: 2155 - DNA, 28 bp, Vibrio parahaemolyticus
  Vibrio parahaemolyticus 09-3216_1
gtgaactgccgaataggtagctgataat

SEQ ID NO: 2156 - DNA, 28 bp, Vibrio parahaemolyticus
  Vibrio parahaemolyticus 09-3216_1
gtgaactgccgcataggtagagaggatc

SEQ ID NO: 2157 - DNA, 28 bp, Vibrio parahaemolyticus
  Vibrio parahaemolyticus 09-3216_1
tcatcactactgaaaagtagctgataac

SEQ ID NO: 2158 - DNA, 28 bp, Vibrio parahaemolyticus
  Vibrio parahaemolyticus 09-3216_1
gaatactgccgaacaggtaggaggctca

SEQ ID NO: 2159 - DNA, 31 bp, Vibrio parahaemolyticus; identical to SEQ ID NO: 1876
  Vibrio parahaemolyticus 09-3216_1

SEQ ID NO: 2160 - DNA, 31 bp, Vibrio parahaemolyticus; identical to SEQ ID NO: 1877
  Vibrio parahaemolyticus 09-3216_1

SEQ ID NO: 2161 - DNA, 31 bp, Vibrio parahaemolyticus; identical to SEQ ID NO: 1878
  Vibrio parahaemolyticus 09-3216_1

SEQ ID NO: 2162 - DNA, 28 bp, Vibrio parahaemolyticus
  Vibrio parahaemolyticus HS-13-1_1
gtgaactgccgaataggtagctgataat

SEQ ID NO: 2163 - DNA, 28 bp, Vibrio parahaemolyticus
  Vibrio parahaemolyticus HS-13-1_1
atgaactgccgaataggtagagaggagc

SEQ ID NO: 2164 - DNA, 28 bp, Vibrio parahaemolyticus
  Vibrio parahaemolyticus HS-13-1_1
tcattactacttaaaagtagctgataac

SEQ ID NO: 2165 - DNA, 28 bp, Vibrio parahaemolyticus
  Vibrio parahaemolyticus HS-13-1_1
gaatactgccgaacaggtaggaggctca

SEQ ID NO: 2166 - DNA, 31 bp, Vibrio parahaemolyticus; identical to SEQ ID NO: 1897
  Vibrio parahaemolyticus HS-13-1_1

SEQ ID NO: 2167 - DNA, 31 bp, Vibrio parahaemolyticus; identical to SEQ ID NO: 1877
  Vibrio parahaemolyticus HS-13-1_1

SEQ ID NO: 2168 - DNA, 31 bp, Vibrio parahaemolyticus; identical to SEQ ID NO: 1878
  Vibrio parahaemolyticus HS-13-1_1

SEQ ID NO: 2169 - DNA, 28 bp, Vibrio parahaemolyticus
  Vibrio parahaemolyticus CFSAN001598
gtgaactgccgaataggtagctgataat

SEQ ID NO: 2170 - DNA, 28 bp, Vibrio parahaemolyticus
  Vibrio parahaemolyticus CFSAN001598
gtgaactgccgcataggtagagaggatc

SEQ ID NO: 2171 - DNA, 28 bp, Vibrio parahaemolyticus
  Vibrio parahaemolyticus CFSAN001598
tcatcactactgaaaagtagctgataac

SEQ ID NO: 2172 - DNA, 28 bp, Vibrio parahaemolyticus
  Vibrio parahaemolyticus CFSAN001598
gaatactgccgaacaggtaggaggctca

SEQ ID NO: 2173 - DNA, 31 bp, Vibrio parahaemolyticus; identical to SEQ ID NO: 1876
  Vibrio parahaemolyticus CFSAN001598

SEQ ID NO: 2174 - DNA, 31 bp, Vibrio parahaemolyticus; identical to SEQ ID NO: 1877
  Vibrio parahaemolyticus CFSAN001598

SEQ ID NO: 2175 - DNA, 31 bp, Vibrio parahaemolyticus; identical to SEQ ID NO: 1878
  Vibrio parahaemolyticus CFSAN001598

SEQ ID NO: 2176 - DNA, 28 bp, Vibrio parahaemolyticus
  Vibrio parahaemolyticus CFSAN018768
gtgaactgccgaataggtagctgataat

SEQ ID NO: 2177 - DNA, 28 bp, Vibrio parahaemolyticus
  Vibrio parahaemolyticus CFSAN018768
gtgaactgccgcataggtagagaggatc

SEQ ID NO: 2178 - DNA, 28 bp, Vibrio parahaemolyticus
  Vibrio parahaemolyticus CFSAN018768
tcatcactactgaaaagtagctgataac

SEQ ID NO: 2179 - DNA, 28 bp, Vibrio parahaemolyticus
  Vibrio parahaemolyticus CFSAN018768
gaatactgccgaacaggtaggaggctca

SEQ ID NO: 2180 - DNA, 31 bp, Vibrio parahaemolyticus; identical to SEQ ID NO: 1876
  Vibrio parahaemolyticus CFSAN018768

SEQ ID NO: 2181 - DNA, 31 bp, Vibrio parahaemolyticus; identical to SEQ ID NO: 1877
  Vibrio parahaemolyticus CFSAN018768

SEQ ID NO: 2182 - DNA, 31 bp, Vibrio parahaemolyticus; identical to SEQ ID NO: 1878
  Vibrio parahaemolyticus CFSAN018768

SEQ ID NO: 2183 - DNA, 28 bp, Vibrio parahaemolyticus
  Vibrio parahaemolyticus CFSAN018774
gtgaactgccgaataggtagctgataat

SEQ ID NO: 2184 - DNA, 28 bp, Vibrio parahaemolyticus
  Vibrio parahaemolyticus CFSAN018774
gtgaactgccgcataggtagagaggatc

SEQ ID NO: 2185 - DNA, 28 bp, Vibrio parahaemolyticus
  Vibrio parahaemolyticus CFSAN018774
tcatcactactgaaaagtagctgataac

SEQ ID NO: 2186 - DNA, 28 bp, Vibrio parahaemolyticus
  Vibrio parahaemolyticus CFSAN018774
gaatactgccgaacaggtaggaggctca

SEQ ID NO: 2187 - DNA, 31 bp, Vibrio parahaemolyticus; identical to SEQ ID NO: 1876
  Vibrio parahaemolyticus CFSAN018774

SEQ ID NO: 2188 - DNA, 31 bp, Vibrio parahaemolyticus; identical to SEQ ID NO: 1877
  Vibrio parahaemolyticus CFSAN018774

SEQ ID NO: 2189 - DNA, 31 bp, Vibrio parahaemolyticus; identical to SEQ ID NO: 1878
  Vibrio parahaemolyticus CFSAN018774

SEQ ID NO: 2190 - DNA, 28 bp, Vibrio parahaemolyticus
  Vibrio parahaemolyticus CFSAN018777
gtgaactgccgaataggtagctgataat

SEQ ID NO: 2191 - DNA, 28 bp, Vibrio parahaemolyticus
  Vibrio parahaemolyticus CFSAN018777
gtgaactgccgcataggtagagaggatc

SEQ ID NO: 2192 - DNA, 28 bp, Vibrio parahaemolyticus
  Vibrio parahaemolyticus CFSAN018777
tcatcactactgaaaagtagctgataac

SEQ ID NO: 2193 - DNA, 28 bp, Vibrio parahaemolyticus
  Vibrio parahaemolyticus CFSAN018777
gaatactgccgaacaggtaggaggctca

SEQ ID NO: 2194 - DNA, 31 bp, Vibrio parahaemolyticus; identical to SEQ ID NO: 1876
  Vibrio parahaemolyticus CFSAN018777

SEQ ID NO: 2195 - DNA, 31 bp, Vibrio parahaemolyticus; identical to SEQ ID NO: 1877
  Vibrio parahaemolyticus CFSAN018777

SEQ ID NO: 2196 - DNA, 31 bp, Vibrio parahaemolyticus; identical to SEQ ID NO: 1878
  Vibrio parahaemolyticus CFSAN018777

SEQ ID NO: 2197 - DNA, 28 bp, Vibrio parahaemolyticus
  Vibrio parahaemolyticus MAVP4
gtgaactgccgaataggtagctgataat

SEQ ID NO: 2198 - DNA, 28 bp, Vibrio parahaemolyticus
  Vibrio parahaemolyticus MAVP4
gtgaactgccgcataggtagagaggatc

SEQ ID NO: 2199 - DNA, 28 bp, Vibrio parahaemolyticus
  Vibrio parahaemolyticus MAVP4
tcatcactactgaaaagtagctgataac

SEQ ID NO: 2200 - DNA, 28 bp, Vibrio parahaemolyticus
  Vibrio parahaemolyticus MAVP4
gaatactgccgaacaggtaggaggctca

SEQ ID NO: 2201 - DNA, 31 bp, Vibrio parahaemolyticus; identical to SEQ ID NO: 1876
  Vibrio parahaemolyticus MAVP4

SEQ ID NO: 2202 - DNA, 31 bp, Vibrio parahaemolyticus; identical to SEQ ID NO: 1877
  Vibrio parahaemolyticus MAVP4

SEQ ID NO: 2203 - DNA, 31 bp, Vibrio parahaemolyticus; identical to SEQ ID NO: 1878
  Vibrio parahaemolyticus MAVP4

SEQ ID NO: 2204 - DNA, 28 bp, Vibrio parahaemolyticus
  Vibrio parahaemolyticus MAVP78
gtgaactgccgaataggtagctgataat

SEQ ID NO: 2205 - DNA, 28 bp, Vibrio parahaemolyticus
  Vibrio parahaemolyticus MAVP78
gtgaactgccgcataggtagagaggatc

SEQ ID NO: 2206 - DNA, 28 bp, Vibrio parahaemolyticus
  Vibrio parahaemolyticus MAVP78
tcatcactactgaaaagtagctgataac

SEQ ID NO: 2207 - DNA, 28 bp, Vibrio parahaemolyticus
  Vibrio parahaemolyticus MAVP78
gaatactgccgaacaggtaggaggctca

SEQ ID NO: 2208 - DNA, 31 bp, Vibrio parahaemolyticus; identical to SEQ ID NO: 1876
  Vibrio parahaemolyticus MAVP78

SEQ ID NO: 2209 - DNA, 31 bp, Vibrio parahaemolyticus; identical to SEQ ID NO: 1877
  Vibrio parahaemolyticus MAVP78

SEQ ID NO: 2210 - DNA, 31 bp, Vibrio parahaemolyticus; identical to SEQ ID NO: 1878
  Vibrio parahaemolyticus MAVP78

SEQ ID NO: 2211 - DNA, 28 bp, Vibrio parahaemolyticus
  Vibrio parahaemolyticus MAVP-94
gtgaactgccgaataggtagctgataat

SEQ ID NO: 2212 - DNA, 28 bp, Vibrio parahaemolyticus
  Vibrio parahaemolyticus MAVP-94
gtgaactgccgcataggtagagaggatc

SEQ ID NO: 2213 - DNA, 28 bp, Vibrio parahaemolyticus
  Vibrio parahaemolyticus MAVP-94
tcatcactactgaaaagtagctgataac

SEQ ID NO: 2214 - DNA, 28 bp, Vibrio parahaemolyticus
  Vibrio parahaemolyticus MAVP-94
gaatactgccgaacaggtaggaggctca

SEQ ID NO: 2215 - DNA, 31 bp, Vibrio parahaemolyticus; identical to SEQ ID NO: 1876
  Vibrio parahaemolyticus MAVP-94

SEQ ID NO: 2216 - DNA, 31 bp, Vibrio parahaemolyticus; identical to SEQ ID NO: 1877
  Vibrio parahaemolyticus MAVP-94

SEQ ID NO: 2217 - DNA, 31 bp, Vibrio parahaemolyticus; identical to SEQ ID NO: 1878
  Vibrio parahaemolyticus MAVP-94

SEQ ID NO: 2218 - DNA, 28 bp, Vibrio parahaemolyticus
  Vibrio parahaemolyticus MEVP12
gtgaactgccgaataggtagctgataat

SEQ ID NO: 2219 - DNA, 28 bp, Vibrio parahaemolyticus
  Vibrio parahaemolyticus MEVP12
gtgaactgccgcataggtagagaggatc

SEQ ID NO: 2220 - DNA, 28 bp, Vibrio parahaemolyticus
  Vibrio parahaemolyticus MEVP12
tcatcactactgaaaagtagctgataac

SEQ ID NO: 2221 - DNA, 28 bp, Vibrio parahaemolyticus
  Vibrio parahaemolyticus MEVP12
gaatactgccgaacaggtaggaggctca

SEQ ID NO: 2222 - DNA, 31 bp, Vibrio parahaemolyticus; identical to SEQ ID NO: 1876
  Vibrio parahaemolyticus MEVP12

SEQ ID NO: 2223 - DNA, 31 bp, Vibrio parahaemolyticus; identical to SEQ ID NO: 1877
  Vibrio parahaemolyticus MEVP12

SEQ ID NO: 2224 - DNA, 31 bp, Vibrio parahaemolyticus; identical to SEQ ID NO: 1878
  Vibrio parahaemolyticus MEVP12

SEQ ID NO: 2225 - DNA, 28 bp, Vibrio anguillarum
  Vibrio anguillarum VIB43
gtgtactgccgagtaggtagctgataat

SEQ ID NO: 2226 - DNA, 28 bp, Vibrio anguillarum
  Vibrio anguillarum VIB43
gtgtactgccgagtaggtagagtgcacc

SEQ ID NO: 2227 - DNA, 32 bp, Vibrio anguillarum
  Vibrio anguillarum VIB43
gtaccacctacaatattaaatacatccaaaca

SEQ ID NO: 2228 - DNA, 28 bp, Vibrio diazotrophicus
  Vibrio diazotrophicus 60.18M
acaaactgccgaataggtagctgataat

SEQ ID NO: 2229 - DNA, 28 bp, Vibrio diazotrophicus
  Vibrio diazotrophicus 60.18M
gtatactaccgaataggtagagtttatc

SEQ ID NO: 2230 - DNA, 28 bp, Vibrio diazotrophicus
  Vibrio diazotrophicus 60.18M
aatattactgatacaagcagctaaattt

SEQ ID NO: 2231 - DNA, 28 bp, Vibrio diazotrophicus
  Vibrio diazotrophicus 60.18M
tcacaactactgaaaagtagctgataac

SEQ ID NO: 2232 - DNA, 28 bp, Vibrio diazotrophicus
  Vibrio diazotrophicus 60.18M
gtatgctgccgaataggcaggttattag

SEQ ID NO: 2233 - DNA, 32 bp, Vibrio diazotrophicus
  Vibrio diazotrophicus 60.18M
tgatatttatttaacgcatccggcgtagcatg

SEQ ID NO: 2234 - DNA, 37 bp, Vibrio diazotrophicus
  Vibrio diazotrophicus 60.18M
ttttacttgcgcagagatgaaatgaggattataatca

SEQ ID NO: 2235 - DNA, 28 bp, Vibrio diazotrophicus
  Vibrio diazotrophicus 60.18M
aaattcacatctcgcggctctgcaaaac

SEQ ID NO: 2236 - DNA, 28 bp, Vibrio diazotrophicus
  Vibrio diazotrophicus 60.18M
aagttcacatcgcccggttctgctaaaa

SEQ ID NO: 2237 - DNA, 28 bp, Vibrio diazotrophicus
  Vibrio diazotrophicus 65.7M
gtgtactgccgagtaggtagctgataat

SEQ ID NO: 2238 - DNA, 28 bp, Vibrio diazotrophicus
  Vibrio diazotrophicus 65.7M
gtgtactgccgagtaggtagatagcttt

SEQ ID NO: 2239 - DNA, 28 bp, Vibrio diazotrophicus
  Vibrio diazotrophicus 65.7M
tcaatactactgtgaagtagctgataat

SEQ ID NO: 2240 - DNA, 28 bp, Vibrio diazotrophicus
  Vibrio diazotrophicus 65.7M
gaatactgccgaataggtagactatcaa

SEQ ID NO: 2241 - DNA, 32 bp, Vibrio diazotrophicus
  Vibrio diazotrophicus 65.7M
tattggcactgttcagtagagaacagctctgg

SEQ ID NO: 2242 - DNA, 31 bp, Vibrio diazotrophicus
  Vibrio diazotrophicus 65.7M
aaatttacatctcccggctctgccaaaaaac

SEQ ID NO: 2243 - DNA, 31 bp, Vibrio diazotrophicus
  Vibrio diazotrophicus 65.7M
aagttcacatcgccaggttctgctaaaaaac

SEQ ID NO: 2244 - DNA, 28 bp, Photobacterium iliopiscarium
  Photobacterium iliopiscarium NCIMB 13478
gtgtactgccgagtaggcagctgataac

SEQ ID NO: 2245 - DNA, 28 bp, Photobacterium iliopiscarium
  Photobacterium iliopiscarium NCIMB 13478
gtgtactgccgaataggtagatacattt

SEQ ID NO: 2246 - DNA, 28 bp, Photobacterium iliopiscarium
  Photobacterium iliopiscarium NCIMB 13478
ccattactactgaaaagtagctgataaa

SEQ ID NO: 2247 - DNA, 28 bp, Photobacterium iliopiscarium
  Photobacterium iliopiscarium NCIMB 13478
atatactgctgaataagtagataattaa

SEQ ID NO: 2248 - DNA, 32 bp, Photobacterium iliopiscarium
  Photobacterium iliopiscarium NCIMB 13478
tctaattaatctaatcccaaaaacatccaatc

SEQ ID NO: 2249 - DNA, 32 bp, Photobacterium iliopiscarium
  Photobacterium iliopiscarium NCIMB 13478
tcccaatcggctataggtaacatcataagatc

SEQ ID NO: 2250 - DNA, 32 bp, Photobacterium iliopiscarium
  Photobacterium iliopiscarium NCIMB 13478
tctaacaaagcattccaatatcatgagcagtg

SEQ ID NO: 2251 - DNA, 32 bp, Photobacterium iliopiscarium
  Photobacterium iliopiscarium NCIMB 13478
aaacgagccacatttatacgagttcaagatca

SEQ ID NO: 2252 - DNA, 32 bp, Photobacterium iliopiscarium
  Photobacterium iliopiscarium NCIMB 13478
aagcgtacgacgtttatccgcgttcaagaaca

SEQ ID NO: 2253 - DNA, 28 bp, Photobacterium iliopiscarium
  Photobacterium iliopiscarium NCIMB 13355
gtgtactgccgagtaggcaactgataac

SEQ ID NO: 2254 - DNA, 28 bp, Photobacterium iliopiscarium
  Photobacterium iliopiscarium NCIMB 13355
gtgtactgccgagtaggcagctgataac

SEQ ID NO: 2255 - DNA, 28 bp, Photobacterium iliopiscarium
  Photobacterium iliopiscarium NCIMB 13355
gtgtactgccgagtaggtacatttatca

SEQ ID NO: 2256 - DNA, 28 bp, Photobacterium iliopiscarium
  Photobacterium iliopiscarium NCIMB 13355
ccattactactgaaaagtagctgataaa

SEQ ID NO: 2257 - DNA, 28 bp, Photobacterium iliopiscarium
  Photobacterium iliopiscarium NCIMB 13355
atatactgctgaataagtagataattaa

SEQ ID NO: 2258 - DNA, 32 bp, Photobacterium iliopiscarium
  Photobacterium iliopiscarium NCIMB 13355
atggttattacttctaaccatgcttgtcgcat

SEQ ID NO: 2259 - DNA, 32 bp, Photobacterium iliopiscarium
  Photobacterium iliopiscarium NCIMB 13355
aaaaattaccgaaaaaagcaaaaatagattta

SEQ ID NO: 2260 - DNA, 32 bp, Photobacterium iliopiscarium
  Photobacterium iliopiscarium NCIMB 13355
gtaacggaaaggtgattgctgatgctactaac

SEQ ID NO: 2261 - DNA, 33 bp, Photobacterium iliopiscarium
  Photobacterium iliopiscarium NCIMB 13355
gtatacagttctttttcggcaataatgatttaa

SEQ ID NO: 2262 - DNA, 32 bp, Photobacterium iliopiscarium
  Photobacterium iliopiscarium NCIMB 13355
aatatatccccgcccctgatgcggaagaaaat

SEQ ID NO: 2263 - DNA, 32 bp, Photobacterium iliopiscarium
  Photobacterium iliopiscarium NCIMB 13355
aaagtccgtttgctgctaataatgccttactt

SEQ ID NO: 2264 - DNA, 32 bp, Photobacterium iliopiscarium
  Photobacterium iliopiscarium NCIMB 13355
gcaaaacgcatcaaaacctgacacttgcacat

SEQ ID NO: 2265 - DNA, 32 bp, Photobacterium iliopiscarium; identical to SEQ ID NO: 2251
  Photobacterium iliopiscarium NCIMB 13355

SEQ ID NO: 2266 - DNA, 32 bp, Photobacterium iliopiscarium
  Photobacterium iliopiscarium NCIMB 13355
aagcgtacaacgtttatccgtgttcaagaaca

SEQ ID NO: 2267 - DNA, 28 bp, Vibrio parahaemolyticus
  Vibrio parahaemolyticus FORC_071
gtgaactgccgaataggtagctgataat

SEQ ID NO: 2268 - DNA, 28 bp, Vibrio parahaemolyticus
  Vibrio parahaemolyticus FORC_071
gtgaactgccgcataggtagagagaatc

SEQ ID NO: 2269 - DNA, 28 bp, Vibrio parahaemolyticus
  Vibrio parahaemolyticus FORC_071
tcattactactaaaaagtagctgataac

SEQ ID NO: 2270 - DNA, 28 bp, Vibrio parahaemolyticus
  Vibrio parahaemolyticus FORC_071
gaatactgccgaacaggtaggaggctca

SEQ ID NO: 2271 - DNA, 32 bp, Vibrio parahaemolyticus; identical to SEQ ID NO: 2035
  Vibrio parahaemolyticus FORC_071

SEQ ID NO: 2272 - DNA, 31 bp, Vibrio parahaemolyticus; identical to SEQ ID NO: 1947
  Vibrio parahaemolyticus FORC_071

SEQ ID NO: 2273 - DNA, 31 bp, Vibrio parahaemolyticus; identical to SEQ ID NO: 1877
  Vibrio parahaemolyticus FORC_071

SEQ ID NO: 2274 - DNA, 31 bp, Vibrio parahaemolyticus; identical to SEQ ID NO: 1878
  Vibrio parahaemolyticus FORC_071

SEQ ID NO: 2275 - DNA, 28 bp, Vibrio parahaemolyticus
  Vibrio parahaemolyticus Vp46
gtgaactgccgaataggtagctgataat

SEQ ID NO: 2276 - DNA, 28 bp, Vibrio parahaemolyticus
  Vibrio parahaemolyticus Vp46
gtgaactgccgaataggtagagagaagc

SEQ ID NO: 2277 - DNA, 28 bp, Vibrio parahaemolyticus
  Vibrio parahaemolyticus Vp46
tcatcactactgaaaagtagctgataac

SEQ ID NO: 2278 - DNA, 28 bp, Vibrio parahaemolyticus
  Vibrio parahaemolyticus Vp46
gaatactgccgaacaggtaggaggctca

SEQ ID NO: 2279 - DNA, 32 bp, Vibrio parahaemolyticus
  Vibrio parahaemolyticus Vp46
tcagaggtagagctatgacattcccactgtaa

SEQ ID NO: 2280 - DNA, 31 bp, Vibrio parahaemolyticus; identical to SEQ ID NO: 1877
  Vibrio parahaemolyticus Vp46

SEQ ID NO: 2281 - DNA, 31 bp, Vibrio parahaemolyticus; identical to SEQ ID NO: 1970
  Vibrio parahaemolyticus Vp46

SEQ ID NO: 2282 - DNA, 28 bp, Vibrio parahaemolyticus
  Vibrio parahaemolyticus G1_3
gtgaactgccgaataggtagctgataat

SEQ ID NO: 2283 - DNA, 28 bp, Vibrio parahaemolyticus
  Vibrio parahaemolyticus G1_3
gtgaactgccgcataggtagagagaatc

SEQ ID NO: 2284 - DNA, 28 bp, Vibrio parahaemolyticus
  Vibrio parahaemolyticus G1_3
tcattactactaaaaagtagctgataac

SEQ ID NO: 2285 - DNA, 28 bp, Vibrio parahaemolyticus
  Vibrio parahaemolyticus G1_3
gaatactgccgaacaggtaggaggctca

SEQ ID NO: 2286 - DNA, 32 bp, Vibrio parahaemolyticus; identical to SEQ ID NO: 1946
  Vibrio parahaemolyticus G1_3

SEQ ID NO: 2287 - DNA, 31 bp, Vibrio parahaemolyticus; identical to SEQ ID NO: 1947
  Vibrio parahaemolyticus G1_3

SEQ ID NO: 2288 - DNA, 31 bp, Vibrio parahaemolyticus; identical to SEQ ID NO: 1877
  Vibrio parahaemolyticus G1_3

SEQ ID NO: 2289 - DNA, 31 bp, Vibrio parahaemolyticus; identical to SEQ ID NO: 1878
  Vibrio parahaemolyticus G1_3

SEQ ID NO: 2290 - DNA, 28 bp, Vibrio parahaemolyticus
  Vibrio parahaemolyticus S175
gtgaactgccgaataggtagctgataat

SEQ ID NO: 2291 - DNA, 28 bp, Vibrio parahaemolyticus
  Vibrio parahaemolyticus S175
gtgaactgccgcataggtagagagaatc

SEQ ID NO: 2292 - DNA, 28 bp, Vibrio parahaemolyticus
  Vibrio parahaemolyticus S175
tcattactactaaaaagtagctgataac

SEQ ID NO: 2293 - DNA, 28 bp, Vibrio parahaemolyticus
  Vibrio parahaemolyticus S175
gaatactgccgaacaggtaggaggctca

SEQ ID NO: 2294 - DNA, 32 bp, Vibrio parahaemolyticus; identical to SEQ ID NO: 1946
  Vibrio parahaemolyticus S175

SEQ ID NO: 2295 - DNA, 31 bp, Vibrio parahaemolyticus; identical to SEQ ID NO: 1947
  Vibrio parahaemolyticus S175

SEQ ID NO: 2296 - DNA, 31 bp, Vibrio parahaemolyticus; identical to SEQ ID NO: 1877
  Vibrio parahaemolyticus S175

SEQ ID NO: 2297 - DNA, 31 bp, Vibrio parahaemolyticus; identical to SEQ ID NO: 1878
  Vibrio parahaemolyticus S175

SEQ ID NO: 2298 - DNA, 28 bp, Vibrio parahaemolyticus
  Vibrio parahaemolyticus F3_1
gtgaactgccgaataggtagctgataat

SEQ ID NO: 2299 - DNA, 28 bp, Vibrio parahaemolyticus
  Vibrio parahaemolyticus F3_1
gtgaactgccgcataggtagagagaatc

SEQ ID NO: 2300 - DNA, 28 bp, Vibrio parahaemolyticus
  Vibrio parahaemolyticus F3_1
tcattactactaaaaagtagctgataac

SEQ ID NO: 2301 - DNA, 28 bp, Vibrio parahaemolyticus
  Vibrio parahaemolyticus F3_1
gaatactgccgaacaggtaggaggctca

SEQ ID NO: 2302 - DNA, 32 bp, Vibrio parahaemolyticus; identical to SEQ ID NO: 1946
  Vibrio parahaemolyticus F3_1

SEQ ID NO: 2303 - DNA, 31 bp, Vibrio parahaemolyticus; identical to SEQ ID NO: 1947
  Vibrio parahaemolyticus F3_1

SEQ ID NO: 2304 - DNA, 31 bp, Vibrio parahaemolyticus; identical to SEQ ID NO: 1877
  Vibrio parahaemolyticus F3_1

SEQ ID NO: 2305 - DNA, 31 bp, Vibrio parahaemolyticus; identical to SEQ ID NO: 1878
  Vibrio parahaemolyticus F3_1

SEQ ID NO: 2306 - DNA, 28 bp, Vibrio parahaemolyticus
  Vibrio parahaemolyticus B4_5
gtgaactgccgaataggtagctgataat

SEQ ID NO: 2307 - DNA, 28 bp, Vibrio parahaemolyticus
  Vibrio parahaemolyticus B4_5
gtgaactgccgcataggtagagagaatc

SEQ ID NO: 2308 - DNA, 28 bp, Vibrio parahaemolyticus
  Vibrio parahaemolyticus B4_5
tcattactactgaaaagtagctgataac

SEQ ID NO: 2309 - DNA, 28 bp, Vibrio parahaemolyticus
  Vibrio parahaemolyticus B4_5
gaatactgccgaacaggtaggaggctca

SEQ ID NO: 2310 - DNA, 32 bp, Vibrio parahaemolyticus
  Vibrio parahaemolyticus B4_5
aagataccacaggctcaagcagatgctaacag

SEQ ID NO: 2311 - DNA, 31 bp, Vibrio parahaemolyticus; identical to SEQ ID NO: 1877
  Vibrio parahaemolyticus B4_5

SEQ ID NO: 2312 - DNA, 31 bp, Vibrio parahaemolyticus; identical to SEQ ID NO: 1970
  Vibrio parahaemolyticus B4_5

SEQ ID NO: 2313 - DNA, 28 bp, Vibrio parahaemolyticus
  Vibrio parahaemolyticus VP130064
gtgaactgccgaataggtagctgataat

SEQ ID NO: 2314 - DNA, 28 bp, Vibrio parahaemolyticus
  Vibrio parahaemolyticus VP130064
gtgaactgccgcataggtagagagaatc

SEQ ID NO: 2315 - DNA, 28 bp, Vibrio parahaemolyticus
  Vibrio parahaemolyticus VP130064
tcattactactaaaaagtagctgataac

SEQ ID NO: 2316 - DNA, 28 bp, Vibrio parahaemolyticus
  Vibrio parahaemolyticus VP130064
gaatactgccgaacaggtaggaggctca

SEQ ID NO: 2317 - DNA, 32 bp, Vibrio parahaemolyticus; identical to SEQ ID NO: 2035
  Vibrio parahaemolyticus VP130064

SEQ ID NO: 2318 - DNA, 31 bp, Vibrio parahaemolyticus; identical to SEQ ID NO: 1947
  Vibrio parahaemolyticus VP130064

SEQ ID NO: 2319 - DNA, 31 bp, Vibrio parahaemolyticus; identical to SEQ ID NO: 1877
  Vibrio parahaemolyticus VP130064

SEQ ID NO: 2320 - DNA, 31 bp, Vibrio parahaemolyticus; identical to SEQ ID NO: 1878
  Vibrio parahaemolyticus VP130064

SEQ ID NO: 2321 - DNA, 28 bp, Vibrio parahaemolyticus
  Vibrio parahaemolyticus VP161109
gtgaactgccgaataggtagctgataat

SEQ ID NO: 2322 - DNA, 28 bp, Vibrio parahaemolyticus
  Vibrio parahaemolyticus VP161109
gtgaactgccgcataggtagagagaatc

SEQ ID NO: 2323 - DNA, 28 bp, Vibrio parahaemolyticus
  Vibrio parahaemolyticus VP161109
tcattactactaaaaagtagctgataac

SEQ ID NO: 2324 - DNA, 28 bp, Vibrio parahaemolyticus
  Vibrio parahaemolyticus VP161109
gaatactgccgaacaggtaggaggctca

SEQ ID NO: 2325 - DNA, 32 bp, Vibrio parahaemolyticus; identical to SEQ ID NO: 2034
  Vibrio parahaemolyticus VP161109

SEQ ID NO: 2326 - DNA, 32 bp, Vibrio parahaemolyticus; identical to SEQ ID NO: 2035
  Vibrio parahaemolyticus VP161109

SEQ ID NO: 2327 - DNA, 31 bp, Vibrio parahaemolyticus; identical to SEQ ID NO: 1947
  Vibrio parahaemolyticus VP161109

SEQ ID NO: 2328 - DNA, 31 bp, Vibrio parahaemolyticus; identical to SEQ ID NO: 1877
  Vibrio parahaemolyticus VP161109

SEQ ID NO: 2329 - DNA, 31 bp, Vibrio parahaemolyticus; identical to SEQ ID NO: 1878
  Vibrio parahaemolyticus VP161109

SEQ ID NO: 2330 - DNA, 28 bp, Vibrio parahaemolyticus
  Vibrio parahaemolyticus VP161504
gtgaactgccgaataggtagctgataat

SEQ ID NO: 2331 - DNA, 28 bp, Vibrio parahaemolyticus
  Vibrio parahaemolyticus VP161504
gtgaactgccgcataggtagagagaatc

SEQ ID NO: 2332 - DNA, 28 bp, Vibrio parahaemolyticus
  Vibrio parahaemolyticus VP161504
tcattactactaaaaagtagctgataac

SEQ ID NO: 2333 - DNA, 28 bp, Vibrio parahaemolyticus
  Vibrio parahaemolyticus VP161504
gaatactgccgaacaggtaggaggctca

SEQ ID NO: 2334 - DNA, 32 bp, Vibrio parahaemolyticus; identical to SEQ ID NO: 2035
  Vibrio parahaemolyticus VP161504

SEQ ID NO: 2335 - DNA, 31 bp, Vibrio parahaemolyticus; identical to SEQ ID NO: 1947
  Vibrio parahaemolyticus VP161504

SEQ ID NO: 2336 - DNA, 31 bp, Vibrio parahaemolyticus; identical to SEQ ID NO: 1877
  Vibrio parahaemolyticus VP161504

SEQ ID NO: 2337 - DNA, 31 bp, Vibrio parahaemolyticus; identical to SEQ ID NO: 1878
  Vibrio parahaemolyticus VP161504

SEQ ID NO: 2338 - DNA, 28 bp, Vibrio parahaemolyticus
  Vibrio parahaemolyticus VP150615
gtgaactgccgaataggtagctgataat

SEQ ID NO: 2339 - DNA, 28 bp, Vibrio parahaemolyticus
  Vibrio parahaemolyticus VP150615
gtgaactgccgcataggtagagagaatc

SEQ ID NO: 2340 - DNA, 28 bp, Vibrio parahaemolyticus
  Vibrio parahaemolyticus VP150615
tcattactactaaaaagtagctgataac

SEQ ID NO: 2341 - DNA, 28 bp, Vibrio parahaemolyticus
  Vibrio parahaemolyticus VP150615
gaatactgccgaacaggtaggaggctca

SEQ ID NO: 2342 - DNA, 32 bp, Vibrio parahaemolyticus; identical to SEQ ID NO: 2035
  Vibrio parahaemolyticus VP150615

SEQ ID NO: 2343 - DNA, 31 bp, Vibrio parahaemolyticus; identical to SEQ ID NO: 1947
  Vibrio parahaemolyticus VP150615

SEQ ID NO: 2344 - DNA, 31 bp, Vibrio parahaemolyticus; identical to SEQ ID NO: 1877
  Vibrio parahaemolyticus VP150615

SEQ ID NO: 2345 - DNA, 31 bp, Vibrio parahaemolyticus; identical to SEQ ID NO: 1878
  Vibrio parahaemolyticus VP150615

SEQ ID NO: 2346 - DNA, 28 bp, Vibrio parahaemolyticus
  Vibrio parahaemolyticus HZ17-083
gtgaactgccgaataggtagctgataat

SEQ ID NO: 2347 - DNA, 28 bp, Vibrio parahaemolyticus
  Vibrio parahaemolyticus HZ17-083
gtgaactgccgcataggtagagagaatc

SEQ ID NO: 2348 - DNA, 28 bp, Vibrio parahaemolyticus
  Vibrio parahaemolyticus HZ17-083
tcattactactaaaaagtagctgataac

SEQ ID NO: 2349 - DNA, 28 bp, Vibrio parahaemolyticus
  Vibrio parahaemolyticus HZ17-083
gaatactgccgaacaggtaggaggctca

SEQ ID NO: 2350 - DNA, 32 bp, Vibrio parahaemolyticus; identical to SEQ ID NO: 2035
  Vibrio parahaemolyticus HZ17-083

SEQ ID NO: 2351 - DNA, 31 bp, Vibrio parahaemolyticus; identical to SEQ ID NO: 1947
  Vibrio parahaemolyticus HZ17-083

SEQ ID NO: 2352 - DNA, 31 bp, Vibrio parahaemolyticus; identical to SEQ ID NO: 1877
  Vibrio parahaemolyticus HZ17-083

SEQ ID NO: 2353 - DNA, 31 bp, Vibrio parahaemolyticus; identical to SEQ ID NO: 1878
  Vibrio parahaemolyticus HZ17-083

SEQ ID NO: 2354 - DNA, 28 bp, Vibrio parahaemolyticus
  Vibrio parahaemolyticus HZ17-018
gtgaacttccgaataggtagctgataat

SEQ ID NO: 2355 - DNA, 28 bp, Vibrio parahaemolyticus
  Vibrio parahaemolyticus HZ17-018
gtgaactgccgcataggtagagaggatc

SEQ ID NO: 2356 - DNA, 28 bp, Vibrio parahaemolyticus
  Vibrio parahaemolyticus HZ17-018
tcattactactgaaaagtagctgataac

SEQ ID NO: 2357 - DNA, 28 bp, Vibrio parahaemolyticus
  Vibrio parahaemolyticus HZ17-018
gaatactgccgaacaggtaggaggctca

SEQ ID NO: 2358 - DNA, 31 bp, Vibrio parahaemolyticus
  Vibrio parahaemolyticus HZ17-018
agataccacaggctcaagcagatgctaacag

SEQ ID NO: 2359 - DNA, 31 bp, Vibrio parahaemolyticus; identical to SEQ ID NO: 1877
  Vibrio parahaemolyticus HZ17-018

SEQ ID NO: 2360 - DNA, 31 bp, Vibrio parahaemolyticus; identical to SEQ ID NO: 1878
  Vibrio parahaemolyticus HZ17-018

SEQ ID NO: 2361 - DNA, 28 bp, Vibrio parahaemolyticus
  Vibrio parahaemolyticus VPCR-2010
gtgaactgccgaataggtagctgataat

SEQ ID NO: 2362 - DNA, 28 bp, Vibrio parahaemolyticus
  Vibrio parahaemolyticus VPCR-2010
gtgaactgccgcataggtagagaggatc

SEQ ID NO: 2363 - DNA, 28 bp, Vibrio parahaemolyticus
  Vibrio parahaemolyticus VPCR-2010
tcatcactacttaaaagtagctgataac

SEQ ID NO: 2364 - DNA, 28 bp, Vibrio parahaemolyticus
  Vibrio parahaemolyticus VPCR-2010
gaatactgccgaacaggtaggaggctca

SEQ ID NO: 2365 - DNA, 31 bp, Vibrio parahaemolyticus; identical to SEQ ID NO: 2018
  Vibrio parahaemolyticus VPCR-2010

SEQ ID NO: 2366 - DNA, 31 bp, Vibrio parahaemolyticus; identical to SEQ ID NO: 1947
  Vibrio parahaemolyticus VPCR-2010

SEQ ID NO: 2367 - DNA, 31 bp, Vibrio parahaemolyticus; identical to SEQ ID NO: 1877
  Vibrio parahaemolyticus VPCR-2010

SEQ ID NO: 2368 - DNA, 31 bp, Vibrio parahaemolyticus; identical to SEQ ID NO: 2146
  Vibrio parahaemolyticus VPCR-2010

SEQ ID NO: 2369 - DNA, 28 bp, Vibrio parahaemolyticus
  Vibrio parahaemolyticus SBR10290
gtgaactgccgaataggtagctgataat

SEQ ID NO: 2370 - DNA, 28 bp, Vibrio parahaemolyticus
  Vibrio parahaemolyticus SBR10290
gtgaactgccgcataggtagagaggatc

SEQ ID NO: 2371 - DNA, 28 bp, Vibrio parahaemolyticus
  Vibrio parahaemolyticus SBR10290
tcatcactactgaaaagtagctgataac

SEQ ID NO: 2372 - DNA, 28 bp, Vibrio parahaemolyticus
  Vibrio parahaemolyticus SBR10290
gaatactgccgaacaggtaggaggctca

SEQ ID NO: 2373 - DNA, 31 bp, Vibrio parahaemolyticus; identical to SEQ ID NO: 1876
  Vibrio parahaemolyticus SBR10290

SEQ ID NO: 2374 - DNA, 31 bp, Vibrio parahaemolyticus; identical to SEQ ID NO: 1877
  Vibrio parahaemolyticus SBR10290

SEQ ID NO: 2375 - DNA, 31 bp, Vibrio parahaemolyticus; identical to SEQ ID NO: 1878
  Vibrio parahaemolyticus SBR10290

SEQ ID NO: 2376 - DNA, 28 bp, Vibrio parahaemolyticus
  Vibrio parahaemolyticus CFSAN007443
gttcaccgccgcataggcagctgataat

SEQ ID NO: 2377 - DNA, 28 bp, Vibrio parahaemolyticus
  Vibrio parahaemolyticus CFSAN007443
attcaccgccgtataggcagctgataat

SEQ ID NO: 2378 - DNA, 28 bp, Vibrio parahaemolyticus
  Vibrio parahaemolyticus CFSAN007443
gttcaccgccgcataggcagatttaact

SEQ ID NO: 2379 - DNA, 28 bp, Vibrio parahaemolyticus
  Vibrio parahaemolyticus CFSAN007443
cactactactgtaaaagtagctgataaa

SEQ ID NO: 2380 - DNA, 28 bp, Vibrio parahaemolyticus
  Vibrio parahaemolyticus CFSAN007443
aattactgctgaataagtagatatttat

SEQ ID NO: 2381 - DNA, 32 bp, Vibrio parahaemolyticus
  Vibrio parahaemolyticus CFSAN007443
gtagaagatggcgtcgttgaatggtcggtgaa

SEQ ID NO: 2382 - DNA, 32 bp, Vibrio parahaemolyticus
  Vibrio parahaemolyticus CFSAN007443
ttcgaattcgtcatccagcaacccaagtacat

SEQ ID NO: 2383 - DNA, 32 bp, Vibrio parahaemolyticus
  Vibrio parahaemolyticus CFSAN007443
actctgcttgattttctggctggagttggtgc

SEQ ID NO: 2384 - DNA, 32 bp, Vibrio parahaemolyticus
  Vibrio parahaemolyticus CFSAN007443
acaaaacaaagttgtacactgttgtctaccgt

SEQ ID NO: 2385 - DNA, 31 bp, Vibrio parahaemolyticus
  Vibrio parahaemolyticus CFSAN007443
aaacgaaccacattcattcgaattcaagatc

SEQ ID NO: 2386 - DNA, 31 bp, Vibrio parahaemolyticus
  Vibrio parahaemolyticus CFSAN007443
aagcgtacgactttcatccgcgtacaagagc

SEQ ID NO: 2387 - DNA, 28 bp, Vibrio parahaemolyticus
  Vibrio parahaemolyticus CFSAN007445
gtgaactgccgaataggtagctgataat

SEQ ID NO: 2388 - DNA, 28 bp, Vibrio parahaemolyticus
  Vibrio parahaemolyticus CFSAN007445
gtgaactgccgcataggtagagaggatc

SEQ ID NO: 2389 - DNA, 28 bp, Vibrio parahaemolyticus
  Vibrio parahaemolyticus CFSAN007445
tcatcactactgaaaagtagctgataac

SEQ ID NO: 2390 - DNA, 28 bp, Vibrio parahaemolyticus
  Vibrio parahaemolyticus CFSAN007445
gaatactgccgaacaggtaggaggctca

SEQ ID NO: 2391 - DNA, 31 bp, Vibrio parahaemolyticus; identical to SEQ ID NO: 1876
  Vibrio parahaemolyticus CFSAN007445

SEQ ID NO: 2392 - DNA, 31 bp, Vibrio parahaemolyticus; identical to SEQ ID NO: 1877
  Vibrio parahaemolyticus CFSAN007445

SEQ ID NO: 2393 - DNA, 31 bp, Vibrio parahaemolyticus; identical to SEQ ID NO: 1970
  Vibrio parahaemolyticus CFSAN007445

SEQ ID NO: 2394 - DNA, 28 bp, Vibrio parahaemolyticus
  Vibrio parahaemolyticus CFSAN007430
gtgaactgccgaataggtagctgataat

SEQ ID NO: 2395 - DNA, 28 bp, Vibrio parahaemolyticus
  Vibrio parahaemolyticus CFSAN007430
gtgaactgccgcataggtagagaggatc

SEQ ID NO: 2396 - DNA, 28 bp, Vibrio parahaemolyticus
  Vibrio parahaemolyticus CFSAN007430
tcatcactactgaaaagtagctgataac

SEQ ID NO: 2397 - DNA, 28 bp, Vibrio parahaemolyticus
  Vibrio parahaemolyticus CFSAN007430
gaatactgccgaacaggtaggaggctca

SEQ ID NO: 2398 - DNA, 31 bp, Vibrio parahaemolyticus; identical to SEQ ID NO: 1876
  Vibrio parahaemolyticus CFSAN007430

SEQ ID NO: 2399 - DNA, 31 bp, Vibrio parahaemolyticus; identical to SEQ ID NO: 1877
  Vibrio parahaemolyticus CFSAN007430

SEQ ID NO: 2400 - DNA, 31 bp, Vibrio parahaemolyticus; identical to SEQ ID NO: 1878
  Vibrio parahaemolyticus CFSAN007430

SEQ ID NO: 2401 - DNA, 28 bp, Vibrio parahaemolyticus
  Vibrio parahaemolyticus CFSAN007432
gtgaactgccgaataggtagctgataat

SEQ ID NO: 2402 - DNA, 28 bp, Vibrio parahaemolyticus
  Vibrio parahaemolyticus CFSAN007432
gtgaactgccgcataggtagagaggatc

SEQ ID NO: 2403 - DNA, 28 bp, Vibrio parahaemolyticus
  Vibrio parahaemolyticus CFSAN007432
tcatcactactgaaaagtagctgataac

SEQ ID NO: 2404 - DNA, 28 bp, Vibrio parahaemolyticus
  Vibrio parahaemolyticus CFSAN007432
gaatactgccgaacaggtaggaggctca

SEQ ID NO: 2405 - DNA, 31 bp, Vibrio parahaemolyticus; identical to SEQ ID NO: 1876
  Vibrio parahaemolyticus CFSAN007432

SEQ ID NO: 2406 - DNA, 31 bp, Vibrio parahaemolyticus; identical to SEQ ID NO: 1877
  Vibrio parahaemolyticus CFSAN007432

SEQ ID NO: 2407 - DNA, 31 bp, Vibrio parahaemolyticus; identical to SEQ ID NO: 1878
  Vibrio parahaemolyticus CFSAN007432

SEQ ID NO: 2408 - DNA, 28 bp, Vibrio parahaemolyticus
  Vibrio parahaemolyticus CFSAN001613
gtgaactgccgaataggtagctgataat

SEQ ID NO: 2409 - DNA, 28 bp, Vibrio parahaemolyticus
  Vibrio parahaemolyticus CFSAN001613
gtgaactgccgcataggtagagaggatc

SEQ ID NO: 2410 - DNA, 28 bp, Vibrio parahaemolyticus
  Vibrio parahaemolyticus CFSAN001613
tcatcactactgaaaagtagctgataac

SEQ ID NO: 2411 - DNA, 28 bp, Vibrio parahaemolyticus
  Vibrio parahaemolyticus CFSAN001613
gaatactgccgaacaggtaggaggctca

SEQ ID NO: 2412 - DNA, 31 bp, Vibrio parahaemolyticus; identical to SEQ ID NO: 1876
  Vibrio parahaemolyticus CFSAN001613

SEQ ID NO: 2413 - DNA, 31 bp, Vibrio parahaemolyticus; identical to SEQ ID NO: 1877
  Vibrio parahaemolyticus CFSAN001613

SEQ ID NO: 2414 - DNA, 31 bp, Vibrio parahaemolyticus; identical to SEQ ID NO: 1878
  Vibrio parahaemolyticus CFSAN001613

SEQ ID NO: 2415 - DNA, 28 bp, Vibrio parahaemolyticus
  Vibrio parahaemolyticus CFSAN007449
gtgaactgccgaataggtagctgataat

SEQ ID NO: 2416 - DNA, 28 bp, Vibrio parahaemolyticus
  Vibrio parahaemolyticus CFSAN007449
gtgaactgccgcataggtagagagaatc

SEQ ID NO: 2417 - DNA, 28 bp, Vibrio parahaemolyticus
  Vibrio parahaemolyticus CFSAN007449
tcattactactaaaaagtagctgataac

SEQ ID NO: 2418 - DNA, 28 bp, Vibrio parahaemolyticus
  Vibrio parahaemolyticus CFSAN007449
gaatactgccgaacaggtaggaggctca

SEQ ID NO: 2419 - DNA, 32 bp, Vibrio parahaemolyticus; identical to SEQ ID NO: 1946
  Vibrio parahaemolyticus CFSAN007449

SEQ ID NO: 2420 - DNA, 31 bp, Vibrio parahaemolyticus; identical to SEQ ID NO: 1947
  Vibrio parahaemolyticus CFSAN007449

SEQ ID NO: 2421 - DNA, 31 bp, Vibrio parahaemolyticus; identical to SEQ ID NO: 1877
  Vibrio parahaemolyticus CFSAN007449

SEQ ID NO: 2422 - DNA, 31 bp, Vibrio parahaemolyticus; identical to SEQ ID NO: 1878
  Vibrio parahaemolyticus CFSAN007449

SEQ ID NO: 2423 - DNA, 28 bp, Vibrio parahaemolyticus
  Vibrio parahaemolyticus 846
gtgaactgccgaataggtagctgataat

SEQ ID NO: 2424 - DNA, 28 bp, Vibrio parahaemolyticus
  Vibrio parahaemolyticus 846
gtgaactgccgcataggtagagaggatc

SEQ ID NO: 2425 - DNA, 28 bp, Vibrio parahaemolyticus
  Vibrio parahaemolyticus 846
tcatcactactgaaaagtagctgataac

SEQ ID NO: 2426 - DNA, 28 bp, Vibrio parahaemolyticus
  Vibrio parahaemolyticus 846
gaatactgccgaacaggtaggaggctca

SEQ ID NO: 2427 - DNA, 31 bp, Vibrio parahaemolyticus; identical to SEQ ID NO: 1876
  Vibrio parahaemolyticus 846

SEQ ID NO: 2428 - DNA, 31 bp, Vibrio parahaemolyticus; identical to SEQ ID NO: 1877
  Vibrio parahaemolyticus 846

SEQ ID NO: 2429 - DNA, 31 bp, Vibrio parahaemolyticus; identical to SEQ ID NO: 1878
  Vibrio parahaemolyticus 846

SEQ ID NO: 2430 - DNA, 28 bp, Vibrio parahaemolyticus
  Vibrio parahaemolyticus VP551
gtgaactgccgaataggtagctgataat

SEQ ID NO: 2431 - DNA, 28 bp, Vibrio parahaemolyticus
  Vibrio parahaemolyticus VP551
gtgaactgccgcataggtagagagaatc

SEQ ID NO: 2432 - DNA, 28 bp, Vibrio parahaemolyticus
  Vibrio parahaemolyticus VP551
tcattactactaaaaagtagctgataac

SEQ ID NO: 2433 - DNA, 28 bp, Vibrio parahaemolyticus
  Vibrio parahaemolyticus VP551
gaatactgccgaacaggtaggaggctca

SEQ ID NO: 2434 - DNA, 32 bp, Vibrio parahaemolyticus; identical to SEQ ID NO: 1946
  Vibrio parahaemolyticus VP551

SEQ ID NO: 2435 - DNA, 31 bp, Vibrio parahaemolyticus; identical to SEQ ID NO: 1947
  Vibrio parahaemolyticus VP551

SEQ ID NO: 2436 - DNA, 31 bp, Vibrio parahaemolyticus; identical to SEQ ID NO: 1877
  Vibrio parahaemolyticus VP551

SEQ ID NO: 2437 - DNA, 31 bp, Vibrio parahaemolyticus; identical to SEQ ID NO: 1878
  Vibrio parahaemolyticus VP551

SEQ ID NO: 2438 - DNA, 28 bp, Vibrio parahaemolyticus
  Vibrio parahaemolyticus 877952
gtgaactgccgaataggtagctgataat

SEQ ID NO: 2439 - DNA, 28 bp, Vibrio parahaemolyticus
  Vibrio parahaemolyticus 877952
gtgaactgccgcataggtagagaggatc

SEQ ID NO: 2440 - DNA, 28 bp, Vibrio parahaemolyticus
  Vibrio parahaemolyticus 877952
tcatcactactgaaaagtagctgataac

SEQ ID NO: 2441 - DNA, 28 bp, Vibrio parahaemolyticus
  Vibrio parahaemolyticus 877952
gaatactgccgaacaggtaggaggctca

SEQ ID NO: 2442 - DNA, 31 bp, Vibrio parahaemolyticus; identical to SEQ ID NO: 1876
  Vibrio parahaemolyticus 877952

SEQ ID NO: 2443 - DNA, 31 bp, Vibrio parahaemolyticus; identical to SEQ ID NO: 1877
  Vibrio parahaemolyticus 877952

SEQ ID NO: 2444 - DNA, 31 bp, Vibrio parahaemolyticus; identical to SEQ ID NO: 1878
  Vibrio parahaemolyticus 877952

SEQ ID NO: 2445 - DNA, 28 bp, Vibrio parahaemolyticus
  Vibrio parahaemolyticus 1934965
gtgaactgccgaataggtagctgataat

SEQ ID NO: 2446 - DNA, 28 bp, Vibrio parahaemolyticus
  Vibrio parahaemolyticus 1934965
gtgaactgccgcataggtagagaggatc

SEQ ID NO: 2447 - DNA, 28 bp, Vibrio parahaemolyticus
  Vibrio parahaemolyticus 1934965
tcatcactactgaaaagtagctgataac

SEQ ID NO: 2448 - DNA, 28 bp, Vibrio parahaemolyticus
  Vibrio parahaemolyticus 1934965
gaatactgccgaacaggtaggaggctca

SEQ ID NO: 2449 - DNA, 31 bp, Vibrio parahaemolyticus; identical to SEQ ID NO: 1876
  Vibrio parahaemolyticus 1934965

SEQ ID NO: 2450 - DNA, 31 bp, Vibrio parahaemolyticus; identical to SEQ ID NO: 1877
  Vibrio parahaemolyticus 1934965

SEQ ID NO: 2451 - DNA, 31 bp, Vibrio parahaemolyticus; identical to SEQ ID NO: 1878
  Vibrio parahaemolyticus 1934965

SEQ ID NO: 2452 - DNA, 28 bp, Vibrio parahaemolyticus
  Vibrio parahaemolyticus 389167
gtgaactgccgaataggtagctgataat

SEQ ID NO: 2453 - DNA, 28 bp, Vibrio parahaemolyticus
  Vibrio parahaemolyticus 389167
gtgaactgccgcataggtagagagaatc

SEQ ID NO: 2454 - DNA, 28 bp, Vibrio parahaemolyticus
  Vibrio parahaemolyticus 389167
tcattactactaaaaagtagctgataac

SEQ ID NO: 2455 - DNA, 28 bp, Vibrio parahaemolyticus
  Vibrio parahaemolyticus 389167
gaatactgccgaacaggtaggaggctca

SEQ ID NO: 2456 - DNA, 32 bp, Vibrio parahaemolyticus; identical to SEQ ID NO: 2034
  Vibrio parahaemolyticus 389167

SEQ ID NO: 2457 - DNA, 32 bp, Vibrio parahaemolyticus; identical to SEQ ID NO: 2035
  Vibrio parahaemolyticus 389167

SEQ ID NO: 2458 - DNA, 31 bp, Vibrio parahaemolyticus; identical to SEQ ID NO: 1947
  Vibrio parahaemolyticus 389167

SEQ ID NO: 2459 - DNA, 31 bp, Vibrio parahaemolyticus; identical to SEQ ID NO: 1877
  Vibrio parahaemolyticus 389167

SEQ ID NO: 2460 - DNA, 31 bp, Vibrio parahaemolyticus; identical to SEQ ID NO: 1878
  Vibrio parahaemolyticus 389167

SEQ ID NO: 2461 - DNA, 28 bp, Vibrio parahaemolyticus
  Vibrio parahaemolyticus 08-0278
gtgaactgccgaataggtagctgataat

SEQ ID NO: 2462 - DNA, 28 bp, Vibrio parahaemolyticus
  Vibrio parahaemolyticus 08-0278
gtgaactgccgcataggtagagagaatc

SEQ ID NO: 2463 - DNA, 28 bp, Vibrio parahaemolyticus
  Vibrio parahaemolyticus 08-0278
tcattactactaaaaagtagctgataac

SEQ ID NO: 2464 - DNA, 28 bp, Vibrio parahaemolyticus
  Vibrio parahaemolyticus 08-0278
gaatactgccgaacaggtaggaggctca

SEQ ID NO: 2465 - DNA, 32 bp, Vibrio parahaemolyticus; identical to SEQ ID NO: 2035
  Vibrio parahaemolyticus 08-0278

SEQ ID NO: 2466 - DNA, 31 bp, Vibrio parahaemolyticus; identical to SEQ ID NO: 1947
  Vibrio parahaemolyticus 08-0278

SEQ ID NO: 2467 - DNA, 31 bp, Vibrio parahaemolyticus
  Vibrio parahaemolyticus 08-0278
aaatttacatctctaggctcagccaaaaagc

SEQ ID NO: 2468 - DNA, 31 bp, Vibrio parahaemolyticus; identical to SEQ ID NO: 1970
  Vibrio parahaemolyticus 08-0278

SEQ ID NO: 2469 - DNA, 28 bp, Vibrio parahaemolyticus
  Vibrio parahaemolyticus MAVP-V
gtgaactgccgaataggtagctgataat

SEQ ID NO: 2470 - DNA, 28 bp, Vibrio parahaemolyticus
  Vibrio parahaemolyticus MAVP-V
gtgaactgccgcataggtagagaggatc

SEQ ID NO: 2471 - DNA, 28 bp, Vibrio parahaemolyticus
  Vibrio parahaemolyticus MAVP-V
tcatcactactgaaaagtagctgataac

SEQ ID NO: 2472 - DNA, 28 bp, Vibrio parahaemolyticus
  Vibrio parahaemolyticus MAVP-V
gaatactgccgaacaggtaggaggctca

SEQ ID NO: 2473 - DNA, 31 bp, Vibrio parahaemolyticus; identical to SEQ ID NO: 1876
  Vibrio parahaemolyticus MAVP-V

SEQ ID NO: 2474 - DNA, 31 bp, Vibrio parahaemolyticus; identical to SEQ ID NO: 1877
  Vibrio parahaemolyticus MAVP-V

SEQ ID NO: 2475 - DNA, 31 bp, Vibrio parahaemolyticus; identical to SEQ ID NO: 1878
  Vibrio parahaemolyticus MAVP-V

SEQ ID NO: 2476 - DNA, 28 bp, Vibrio parahaemolyticus
  Vibrio parahaemolyticus PMA37.5
gtgaactgccgaataggtagctgataat

SEQ ID NO: 2477 - DNA, 28 bp, Vibrio parahaemolyticus
  Vibrio parahaemolyticus PMA37.5
gtgaactgccgcataggtagagagaatc

SEQ ID NO: 2478 - DNA, 28 bp, Vibrio parahaemolyticus
  Vibrio parahaemolyticus PMA37.5
tcattactactaaaaagtagctgataac

SEQ ID NO: 2479 - DNA, 28 bp, Vibrio parahaemolyticus
  Vibrio parahaemolyticus PMA37.5
gaatactgccgaacaggtaggaggctca

SEQ ID NO: 2480 - DNA, 32 bp, Vibrio parahaemolyticus; identical to SEQ ID NO: 1946
  Vibrio parahaemolyticus PMA37.5

SEQ ID NO: 2481 - DNA, 31 bp, Vibrio parahaemolyticus; identical to SEQ ID NO: 1947
  Vibrio parahaemolyticus PMA37.5

SEQ ID NO: 2482 - DNA, 31 bp, Vibrio parahaemolyticus; identical to SEQ ID NO: 1877
  Vibrio parahaemolyticus PMA37.5

SEQ ID NO: 2483 - DNA, 31 bp, Vibrio parahaemolyticus; identical to SEQ ID NO: 1878
  Vibrio parahaemolyticus PMA37.5

SEQ ID NO: 2484 - DNA, 28 bp, Vibrio parahaemolyticus
  Vibrio parahaemolyticus ATC210
gtgaactgccgaataggtagctgataat

SEQ ID NO: 2485 - DNA, 28 bp, Vibrio parahaemolyticus
  Vibrio parahaemolyticus ATC210
gtgaactgccgcataggtagagagaatc

SEQ ID NO: 2486 - DNA, 28 bp, Vibrio parahaemolyticus
  Vibrio parahaemolyticus ATC210
tcattactactaaaaagtagctgataac

SEQ ID NO: 2487 - DNA, 28 bp, Vibrio parahaemolyticus
  Vibrio parahaemolyticus ATC210
gaatactgccgaacaggtaggaggctca

SEQ ID NO: 2488 - DNA, 32 bp, Vibrio parahaemolyticus; identical to SEQ ID NO: 1946
  Vibrio parahaemolyticus ATC210

SEQ ID NO: 2489 - DNA, 31 bp, Vibrio parahaemolyticus; identical to SEQ ID NO: 1947
  Vibrio parahaemolyticus ATC210

SEQ ID NO: 2490 - DNA, 31 bp, Vibrio parahaemolyticus; identical to SEQ ID NO: 1877
  Vibrio parahaemolyticus ATC210

SEQ ID NO: 2491 - DNA, 31 bp, Vibrio parahaemolyticus; identical to SEQ ID NO: 1878
  Vibrio parahaemolyticus ATC210

SEQ ID NO: 2492 - DNA, 28 bp, Vibrio fluvialis
  Vibrio fluvialis FDAARGOS_104
gttcaccgccgcataggcagctgataat

SEQ ID NO: 2493 - DNA, 28 bp, Vibrio fluvialis
  Vibrio fluvialis FDAARGOS_104
gttcaccgccgcataggcagatttaact

SEQ ID NO: 2494 - DNA, 28 bp, Vibrio fluvialis
  Vibrio fluvialis FDAARGOS_104
caatactactgcaaaagtagttgataac

SEQ ID NO: 2495 - DNA, 28 bp, Vibrio fluvialis
  Vibrio fluvialis FDAARGOS_104
aggtactactgaataagtagatattgaa

SEQ ID NO: 2496 - DNA, 32 bp, Vibrio fluvialis
  Vibrio fluvialis FDAARGOS_104
atggcgagcgacggaaaccgtaaatgtgaagt

SEQ ID NO: 2497 - DNA, 32 bp, Vibrio fluvialis
  Vibrio fluvialis FDAARGOS_104
ttgcacgggcgcaagccgttccggacgttcaa

SEQ ID NO: 2498 - DNA, 31 bp, Vibrio fluvialis
  Vibrio fluvialis FDAARGOS_104
aaacgtaccactttcattcgagctcgtgatc

SEQ ID NO: 2499 - DNA, 31 bp, Vibrio fluvialis
  Vibrio fluvialis FDAARGOS_104
aagcgtactaccttcatccgcgtacaagagc

SEQ ID NO: 2500 - DNA, 28 bp, Vibrio parahaemolyticus
  Vibrio parahaemolyticus H11523
gtgaactgccgaataggtagctgataat

SEQ ID NO: 2501 - DNA, 28 bp, Vibrio parahaemolyticus
  Vibrio parahaemolyticus H11523
gtgaactgccgcataggtagagaggatc

SEQ ID NO: 2502 - DNA, 28 bp, Vibrio parahaemolyticus
  Vibrio parahaemolyticus H11523
tcatcactactgaaaagtagctgataac

SEQ ID NO: 2503 - DNA, 28 bp, Vibrio parahaemolyticus
  Vibrio parahaemolyticus H11523
gaatactgccgaacaggtaggaggctca

SEQ ID NO: 2504 - DNA, 31 bp, Vibrio parahaemolyticus; identical to SEQ ID NO: 1876
  Vibrio parahaemolyticus H11523

SEQ ID NO: 2505 - DNA, 31 bp, Vibrio parahaemolyticus; identical to SEQ ID NO: 1877
  Vibrio parahaemolyticus H11523

SEQ ID NO: 2506 - DNA, 31 bp, Vibrio parahaemolyticus; identical to SEQ ID NO: 1878
  Vibrio parahaemolyticus H11523

SEQ ID NO: 2507 - DNA, 28 bp, Vibrio parahaemolyticus
  Vibrio parahaemolyticus A0EZ664
gtgaactgccgaataggtagctgataat

SEQ ID NO: 2508 - DNA, 28 bp, Vibrio parahaemolyticus
  Vibrio parahaemolyticus A0EZ664
gtgaactgccgcataggtagagaggatc

SEQ ID NO: 2509 - DNA, 28 bp, Vibrio parahaemolyticus
  Vibrio parahaemolyticus A0EZ664
tcatcactactgaaaagtagctgataac

SEQ ID NO: 2510 - DNA, 28 bp, Vibrio parahaemolyticus
  Vibrio parahaemolyticus A0EZ664
gaatactgccgaacaggtaggaggctca

SEQ ID NO: 2511 - DNA, 31 bp, Vibrio parahaemolyticus; identical to SEQ ID NO: 1876
  Vibrio parahaemolyticus A0EZ664

SEQ ID NO: 2512 - DNA, 31 bp, Vibrio parahaemolyticus; identical to SEQ ID NO: 1877
  Vibrio parahaemolyticus A0EZ664

SEQ ID NO: 2513 - DNA, 31 bp, Vibrio parahaemolyticus; identical to SEQ ID NO: 1970
  Vibrio parahaemolyticus A0EZ664

SEQ ID NO: 2514 - DNA, 28 bp, Vibrio parahaemolyticus
  Vibrio parahaemolyticus F1419
gtgaactgccgaataggtagctgataat

SEQ ID NO: 2515 - DNA, 28 bp, Vibrio parahaemolyticus
  Vibrio parahaemolyticus F1419
gtgaactgccgcataggtagagaggatc

SEQ ID NO: 2516 - DNA, 28 bp, Vibrio parahaemolyticus
  Vibrio parahaemolyticus F1419
tcatcactactgaaaagtagctgataac

SEQ ID NO: 2517 - DNA, 28 bp, Vibrio parahaemolyticus
  Vibrio parahaemolyticus F1419
gaatactgccgaacaggtaggaggctca

SEQ ID NO: 2518 - DNA, 31 bp, Vibrio parahaemolyticus; identical to SEQ ID NO: 1876
  Vibrio parahaemolyticus F1419

SEQ ID NO: 2519 - DNA, 31 bp, Vibrio parahaemolyticus; identical to SEQ ID NO: 1877
  Vibrio parahaemolyticus F1419

SEQ ID NO: 2520 - DNA, 31 bp, Vibrio parahaemolyticus; identical to SEQ ID NO: 1970
  Vibrio parahaemolyticus F1419

SEQ ID NO: 2521 - DNA, 28 bp, Vibrio parahaemolyticus
  Vibrio parahaemolyticus 482000
gtgaactgccgaataggtagctgataat

SEQ ID NO: 2522 - DNA, 28 bp, Vibrio parahaemolyticus
  Vibrio parahaemolyticus 482000
gtgaactgccgcataggtagagaggatc

SEQ ID NO: 2523 - DNA, 28 bp, Vibrio parahaemolyticus
  Vibrio parahaemolyticus 482000
tcatcactactgaaaagtagctgataac

SEQ ID NO: 2524 - DNA, 28 bp, Vibrio parahaemolyticus
  Vibrio parahaemolyticus 482000
gaatactgccgaacaggtaggaggctca

SEQ ID NO: 2525 - DNA, 31 bp, Vibrio parahaemolyticus; identical to SEQ ID NO: 1876
  Vibrio parahaemolyticus 482000

SEQ ID NO: 2526 - DNA, 31 bp, Vibrio parahaemolyticus; identical to SEQ ID NO: 1877
  Vibrio parahaemolyticus 482000

SEQ ID NO: 2527 - DNA, 31 bp, Vibrio parahaemolyticus; identical to SEQ ID NO: 1878
  Vibrio parahaemolyticus 482000

SEQ ID NO: 2528 - DNA, 28 bp, Vibrio parahaemolyticus
  Vibrio parahaemolyticus C144
gtgaactgccgaataggtagctgataat

SEQ ID NO: 2529 - DNA, 28 bp, Vibrio parahaemolyticus
  Vibrio parahaemolyticus C144
gtgaactgccgcataggtagagaggatc

SEQ ID NO: 2530 - DNA, 28 bp, Vibrio parahaemolyticus
  Vibrio parahaemolyticus C144
tcatcactactgaaaagtagctgataac

SEQ ID NO: 2531 - DNA, 28 bp, Vibrio parahaemolyticus
  Vibrio parahaemolyticus C144
gaatactgccgaacaggtaggaggctca

SEQ ID NO: 2532 - DNA, 31 bp, Vibrio parahaemolyticus; identical to SEQ ID NO: 1876
  Vibrio parahaemolyticus C144

SEQ ID NO: 2533 - DNA, 31 bp, Vibrio parahaemolyticus; identical to SEQ ID NO: 1877
  Vibrio parahaemolyticus C144

SEQ ID NO: 2534 - DNA, 31 bp, Vibrio parahaemolyticus; identical to SEQ ID NO: 1878
  Vibrio parahaemolyticus C144

SEQ ID NO: 2535 - DNA, 28 bp, Vibrio parahaemolyticus
  Vibrio parahaemolyticus 1056404
gtgaactgccgaataggtagctgataat

SEQ ID NO: 2536 - DNA, 28 bp, Vibrio parahaemolyticus
  Vibrio parahaemolyticus 1056404
atgaactgccgaataggtagagaggagc

SEQ ID NO: 2537 - DNA, 28 bp, Vibrio parahaemolyticus
  Vibrio parahaemolyticus 1056404
tcattactacttaaaagtagctgataac

SEQ ID NO: 2538 - DNA, 28 bp, Vibrio parahaemolyticus
  Vibrio parahaemolyticus 1056404
gaatactgccgaacaggtaggaggctca

SEQ ID NO: 2539 - DNA, 31 bp, Vibrio parahaemolyticus; identical to SEQ ID NO: 1897
  Vibrio parahaemolyticus 1056404

SEQ ID NO: 2540 - DNA, 31 bp, Vibrio parahaemolyticus; identical to SEQ ID NO: 1877
  Vibrio parahaemolyticus 1056404

SEQ ID NO: 2541 - DNA, 31 bp, Vibrio parahaemolyticus; identical to SEQ ID NO: 1878
  Vibrio parahaemolyticus 1056404

SEQ ID NO: 2542 - DNA, 28 bp, Vibrio parahaemolyticus
  Vibrio parahaemolyticus A4EZ964
gtgaactgccgaataggtagctgataat

SEQ ID NO: 2543 - DNA, 28 bp, Vibrio parahaemolyticus
  Vibrio parahaemolyticus A4EZ964
gtgaactgccgcataggtagagaggatc

SEQ ID NO: 2544 - DNA, 28 bp, Vibrio parahaemolyticus
  Vibrio parahaemolyticus A4EZ964
tcatcactactgaaaagtagctgataac

SEQ ID NO: 2545 - DNA, 28 bp, Vibrio parahaemolyticus
  Vibrio parahaemolyticus A4EZ964
gaatactgccgaacaggtaggaggctca

SEQ ID NO: 2546 - DNA, 31 bp, Vibrio parahaemolyticus; identical to SEQ ID NO: 1876
  Vibrio parahaemolyticus A4EZ964

SEQ ID NO: 2547 - DNA, 31 bp, Vibrio parahaemolyticus; identical to SEQ ID NO: 1877
  Vibrio parahaemolyticus A4EZ964

SEQ ID NO: 2548 - DNA, 31 bp, Vibrio parahaemolyticus; identical to SEQ ID NO: 1970
  Vibrio parahaemolyticus A4EZ964

SEQ ID NO: 2549 - DNA, 28 bp, Vibrio parahaemolyticus
  Vibrio parahaemolyticus 237500
gtgaactgccgaataggtagctgataat

SEQ ID NO: 2550 - DNA, 28 bp, Vibrio parahaemolyticus
  Vibrio parahaemolyticus 237500
gtgaactgccgcataggtagagaggatc

SEQ ID NO: 2551 - DNA, 28 bp, Vibrio parahaemolyticus
  Vibrio parahaemolyticus 237500
tcatcactactgaaaagtagctgataac

SEQ ID NO: 2552 - DNA, 28 bp, Vibrio parahaemolyticus
  Vibrio parahaemolyticus 237500
gaatactgccgaacaggtaggaggctca

SEQ ID NO: 2553 - DNA, 31 bp, Vibrio parahaemolyticus; identical to SEQ ID NO: 1876
  Vibrio parahaemolyticus 237500

SEQ ID NO: 2554 - DNA, 31 bp, Vibrio parahaemolyticus; identical to SEQ ID NO: 1877
  Vibrio parahaemolyticus 237500

SEQ ID NO: 2555 - DNA, 31 bp, Vibrio parahaemolyticus; identical to SEQ ID NO: 1878
  Vibrio parahaemolyticus 237500

SEQ ID NO: 2556 - DNA, 28 bp, Vibrio parahaemolyticus
  Vibrio parahaemolyticus CFSAN029656
gtgaactgccgaataggtagctgataat

SEQ ID NO: 2557 - DNA, 28 bp, Vibrio parahaemolyticus
  Vibrio parahaemolyticus CFSAN029656
gtgaactgccgcataggtagagagaatc

SEQ ID NO: 2558 - DNA, 28 bp, Vibrio parahaemolyticus
  Vibrio parahaemolyticus CFSAN029656
tcattactactaaaaagtagctgataac

SEQ ID NO: 2559 - DNA, 28 bp, Vibrio parahaemolyticus
  Vibrio parahaemolyticus CFSAN029656
gaatactgccgaacaggtaggaggctca

SEQ ID NO: 2560 - DNA, 32 bp, Vibrio parahaemolyticus; identical to SEQ ID NO: 2034
  Vibrio parahaemolyticus CFSAN029656

SEQ ID NO: 2561 - DNA, 32 bp, Vibrio parahaemolyticus; identical to SEQ ID NO: 2035
  Vibrio parahaemolyticus CFSAN029656

SEQ ID NO: 2562 - DNA, 31 bp, Vibrio parahaemolyticus; identical to SEQ ID NO: 1947
  Vibrio parahaemolyticus CFSAN029656

SEQ ID NO: 2563 - DNA, 31 bp, Vibrio parahaemolyticus; identical to SEQ ID NO: 1877
  Vibrio parahaemolyticus CFSAN029656

SEQ ID NO: 2564 - DNA, 31 bp, Vibrio parahaemolyticus; identical to SEQ ID NO: 2038
  Vibrio parahaemolyticus CFSAN029656

SEQ ID NO: 2565 - DNA, 28 bp, Vibrio parahaemolyticus
  Vibrio parahaemolyticus CFSAN025054
gtgaactgccgaataggtagctgataat

SEQ ID NO: 2566 - DNA, 28 bp, Vibrio parahaemolyticus
  Vibrio parahaemolyticus CFSAN025054
gtgaactgccgcataggtagagagaatc

SEQ ID NO: 2567 - DNA, 28 bp, Vibrio parahaemolyticus
  Vibrio parahaemolyticus CFSAN025054
tcattactactaaaaagtagctgataac

SEQ ID NO: 2568 - DNA, 28 bp, Vibrio parahaemolyticus
  Vibrio parahaemolyticus CFSAN025054
gaatactgccgaacaggtaggaggctca

SEQ ID NO: 2569 - DNA, 32 bp, Vibrio parahaemolyticus; identical to SEQ ID NO: 2034
  Vibrio parahaemolyticus CFSAN025054

SEQ ID NO: 2570 - DNA, 32 bp, Vibrio parahaemolyticus; identical to SEQ ID NO: 2035
  Vibrio parahaemolyticus CFSAN025054

SEQ ID NO: 2571 - DNA, 31 bp, Vibrio parahaemolyticus; identical to SEQ ID NO: 1947
  Vibrio parahaemolyticus CFSAN025054

SEQ ID NO: 2572 - DNA, 31 bp, Vibrio parahaemolyticus; identical to SEQ ID NO: 1877
  Vibrio parahaemolyticus CFSAN025054

SEQ ID NO: 2573 - DNA, 31 bp, Vibrio parahaemolyticus; identical to SEQ ID NO: 2038
  Vibrio parahaemolyticus CFSAN025054

SEQ ID NO: 2574 - DNA, 28 bp, Vibrio parahaemolyticus
  Vibrio parahaemolyticus CFSAN001174
gtgaactgccgaataggtagctgataat

SEQ ID NO: 2575 - DNA, 28 bp, Vibrio parahaemolyticus
  Vibrio parahaemolyticus CFSAN001174
gtgaactgccgcataggtagagaggatc

SEQ ID NO: 2576 - DNA, 28 bp, Vibrio parahaemolyticus
  Vibrio parahaemolyticus CFSAN001174
tcatcactactgaaaagtagctgataac

SEQ ID NO: 2577 - DNA, 28 bp, Vibrio parahaemolyticus
  Vibrio parahaemolyticus CFSAN001174
gaatactgccgaacaggtaggaggctca

SEQ ID NO: 2578 - DNA, 31 bp, Vibrio parahaemolyticus; identical to SEQ ID NO: 1876
  Vibrio parahaemolyticus CFSAN001174

SEQ ID NO: 2579 - DNA, 31 bp, Vibrio parahaemolyticus; identical to SEQ ID NO: 1877
  Vibrio parahaemolyticus CFSAN001174

SEQ ID NO: 2580 - DNA, 31 bp, Vibrio parahaemolyticus; identical to SEQ ID NO: 1970
  Vibrio parahaemolyticus CFSAN001174

SEQ ID NO: 2581 - DNA, 28 bp, Vibrio parahaemolyticus
  Vibrio parahaemolyticus CFSAN018763
gtgaactgccgaataggtagctgataat

SEQ ID NO: 2582 - DNA, 28 bp, Vibrio parahaemolyticus
  Vibrio parahaemolyticus CFSAN018763
gtgaactgccgcataggtagagaggatc

SEQ ID NO: 2583 - DNA, 28 bp, Vibrio parahaemolyticus
  Vibrio parahaemolyticus CFSAN018763
tcatcactactgaaaagtagctgataac

SEQ ID NO: 2584 - DNA, 28 bp, Vibrio parahaemolyticus
  Vibrio parahaemolyticus CFSAN018763
gaatactgccgaacaggtaggaggctca

SEQ ID NO: 2585 - DNA, 31 bp, Vibrio parahaemolyticus; identical to SEQ ID NO: 1876
  Vibrio parahaemolyticus CFSAN018763

SEQ ID NO: 2586 - DNA, 31 bp, Vibrio parahaemolyticus; identical to SEQ ID NO: 1877
  Vibrio parahaemolyticus CFSAN018763

SEQ ID NO: 2587 - DNA, 31 bp, Vibrio parahaemolyticus; identical to SEQ ID NO: 1970
  Vibrio parahaemolyticus CFSAN018763

SEQ ID NO: 2588 - DNA, 28 bp, Vibrio parahaemolyticus
  Vibrio parahaemolyticus GCSL_R47
gtgaactgccgaataggtagctgataat

SEQ ID NO: 2589 - DNA, 28 bp, Vibrio parahaemolyticus
  Vibrio parahaemolyticus GCSL_R47
atgaactgccgaataggtagagaggagc

SEQ ID NO: 2590 - DNA, 28 bp, Vibrio parahaemolyticus
  Vibrio parahaemolyticus GCSL_R47
tcattactacttaaaagtagctgataac

SEQ ID NO: 2591 - DNA, 28 bp, Vibrio parahaemolyticus
  Vibrio parahaemolyticus GCSL_R47
gaatactgccgaacaggtaggaggctca

SEQ ID NO: 2592 - DNA, 31 bp, Vibrio parahaemolyticus; identical to SEQ ID NO: 1897
  Vibrio parahaemolyticus GCSL_R47

SEQ ID NO: 2593 - DNA, 31 bp, Vibrio parahaemolyticus; identical to SEQ ID NO: 1877
  Vibrio parahaemolyticus GCSL_R47

SEQ ID NO: 2594 - DNA, 31 bp, Vibrio parahaemolyticus; identical to SEQ ID NO: 1878
  Vibrio parahaemolyticus GCSL_R47

SEQ ID NO: 2595 - DNA, 28 bp, Vibrio parahaemolyticus
  Vibrio parahaemolyticus GCSL_R51
gtgaactgccgaataggtagctgataat

SEQ ID NO: 2596 - DNA, 28 bp, Vibrio parahaemolyticus
  Vibrio parahaemolyticus GCSL_R51
atgaactgccgaataggtagagaggagc

SEQ ID NO: 2597 - DNA, 28 bp, Vibrio parahaemolyticus
  Vibrio parahaemolyticus GCSL_R51
tcattactacttaaaagtagctgataac

SEQ ID NO: 2598 - DNA, 28 bp, Vibrio parahaemolyticus
  Vibrio parahaemolyticus GCSL_R51
gaatactgccgaacaggtaggaggctca

SEQ ID NO: 2599 - DNA, 31 bp, Vibrio parahaemolyticus; identical to SEQ ID NO: 1897
  Vibrio parahaemolyticus GCSL_R51

SEQ ID NO: 2600 - DNA, 31 bp, Vibrio parahaemolyticus; identical to SEQ ID NO: 1877
  Vibrio parahaemolyticus GCSL_R51

SEQ ID NO: 2601 - DNA, 31 bp, Vibrio parahaemolyticus; identical to SEQ ID NO: 1878
  Vibrio parahaemolyticus GCSL_R51

SEQ ID NO: 2602 - DNA, 28 bp, Vibrio parahaemolyticus
  Vibrio parahaemolyticus GCSL_R131
gtgaactgccgaataggtagctgataat

SEQ ID NO: 2603 - DNA, 28 bp, Vibrio parahaemolyticus
  Vibrio parahaemolyticus GCSL_R131
atgaactgccgaataggtagagaggagc

SEQ ID NO: 2604 - DNA, 28 bp, Vibrio parahaemolyticus
  Vibrio parahaemolyticus GCSL_R131
tcattactacttaaaagtagctgataac

SEQ ID NO: 2605 - DNA, 28 bp, Vibrio parahaemolyticus
  Vibrio parahaemolyticus GCSL_R131
gaatactgccgaacaggtaggaggctca

SEQ ID NO: 2606 - DNA, 31 bp, Vibrio parahaemolyticus; identical to SEQ ID NO: 1897
  Vibrio parahaemolyticus GCSL_R131

SEQ ID NO: 2607 - DNA, 31 bp, Vibrio parahaemolyticus; identical to SEQ ID NO: 1877
  Vibrio parahaemolyticus GCSL_R131

SEQ ID NO: 2608 - DNA, 31 bp, Vibrio parahaemolyticus; identical to SEQ ID NO: 1970
  Vibrio parahaemolyticus GCSL_R131

SEQ ID NO: 2609 - DNA, 28 bp, Vibrio parahaemolyticus
  Vibrio parahaemolyticus GCSL_R136
gtgaactgccgaataggtagctgataat

SEQ ID NO: 2610 - DNA, 28 bp, Vibrio parahaemolyticus
  Vibrio parahaemolyticus GCSL_R136
atgaactgccgaataggtagagaggagc

SEQ ID NO: 2611 - DNA, 28 bp, Vibrio parahaemolyticus
  Vibrio parahaemolyticus GCSL_R136
tcattactacttaaaagtagctgataac

SEQ ID NO: 2612 - DNA, 28 bp, Vibrio parahaemolyticus
  Vibrio parahaemolyticus GCSL_R136
gaatactgccgaacaggtaggaggctca

SEQ ID NO: 2613 - DNA, 31 bp, Vibrio parahaemolyticus; identical to SEQ ID NO: 1897
  Vibrio parahaemolyticus GCSL_R136

SEQ ID NO: 2614 - DNA, 31 bp, Vibrio parahaemolyticus; identical to SEQ ID NO: 1877
  Vibrio parahaemolyticus GCSL_R136

SEQ ID NO: 2615 - DNA, 31 bp, Vibrio parahaemolyticus; identical to SEQ ID NO: 1970
  Vibrio parahaemolyticus GCSL_R136

SEQ ID NO: 2616 - DNA, 28 bp, Vibrio parahaemolyticus
  Vibrio parahaemolyticus CDC_K5324W
gtgaactgccgaataggtagctgataat

SEQ ID NO: 2617 - DNA, 28 bp, Vibrio parahaemolyticus
  Vibrio parahaemolyticus CDC_K5324W
gtgaactgccgcataggtagagaggatc

SEQ ID NO: 2618 - DNA, 28 bp, Vibrio parahaemolyticus
  Vibrio parahaemolyticus CDC_K5324W
tcatcactactgaaaagtagctgataac

SEQ ID NO: 2619 - DNA, 28 bp, Vibrio parahaemolyticus
  Vibrio parahaemolyticus CDC_K5324W
gaatactgccgaacaggtaggaggctca

SEQ ID NO: 2620 - DNA, 31 bp, Vibrio parahaemolyticus; identical to SEQ ID NO: 1876
  Vibrio parahaemolyticus CDC_K5324W

SEQ ID NO: 2621 - DNA, 31 bp, Vibrio parahaemolyticus; identical to SEQ ID NO: 1877
  Vibrio parahaemolyticus CDC_K5324W

SEQ ID NO: 2622 - DNA, 31 bp, Vibrio parahaemolyticus; identical to SEQ ID NO: 1970
  Vibrio parahaemolyticus CDC_K5324W

SEQ ID NO: 2623 - DNA, 28 bp, Vibrio parahaemolyticus
  Vibrio parahaemolyticus CDC_K5308
gtgaactgccgaataggtagctgataat

SEQ ID NO: 2624 - DNA, 28 bp, Vibrio parahaemolyticus
  Vibrio parahaemolyticus CDC_K5308
gtgaactgccgcataggtagagaggatc

SEQ ID NO: 2625 - DNA, 28 bp, Vibrio parahaemolyticus
  Vibrio parahaemolyticus CDC_K5308
tcatcactactgaaaagtagctgataac

SEQ ID NO: 2626 - DNA, 28 bp, Vibrio parahaemolyticus
  Vibrio parahaemolyticus CDC_K5308
gaatactgccgaacaggtaggaggctca

SEQ ID NO: 2627 - DNA, 31 bp, Vibrio parahaemolyticus; identical to SEQ ID NO: 1876
  Vibrio parahaemolyticus CDC_K5308

SEQ ID NO: 2628 - DNA, 31 bp, Vibrio parahaemolyticus; identical to SEQ ID NO: 1877
  Vibrio parahaemolyticus CDC_K5308

SEQ ID NO: 2629 - DNA, 31 bp, Vibrio parahaemolyticus; identical to SEQ ID NO: 1878
  Vibrio parahaemolyticus CDC_K5308

SEQ ID NO: 2630 - DNA, 28 bp, Vibrio parahaemolyticus
  Vibrio parahaemolyticus CDC_K4639W
gtgaactgccgaataggtagctgataat

SEQ ID NO: 2631 - DNA, 28 bp, Vibrio parahaemolyticus
  Vibrio parahaemolyticus CDC_K4639W
gtgaactgccgcataggtagagaggatc

SEQ ID NO: 2632 - DNA, 28 bp, Vibrio parahaemolyticus
  Vibrio parahaemolyticus CDC_K4639W
tcatcactactgaaaagtagctgataac

SEQ ID NO: 2633 - DNA, 28 bp, Vibrio parahaemolyticus
  Vibrio parahaemolyticus CDC_K4639W
gaatactgccgaacaggtaggaggctca

SEQ ID NO: 2634 - DNA, 31 bp, Vibrio parahaemolyticus; identical to SEQ ID NO: 1876
  Vibrio parahaemolyticus CDC_K4639W

SEQ ID NO: 2635 - DNA, 31 bp, Vibrio parahaemolyticus; identical to SEQ ID NO: 1877
  Vibrio parahaemolyticus CDC_K4639W

SEQ ID NO: 2636 - DNA, 31 bp, Vibrio parahaemolyticus; identical to SEQ ID NO: 1878
  Vibrio parahaemolyticus CDC_K4639W

SEQ ID NO: 2637 - DNA, 28 bp, Vibrio parahaemolyticus
  Vibrio parahaemolyticus CDC_K4639G
gtgaactgccgaataggtagctgataat

SEQ ID NO: 2638 - DNA, 28 bp, Vibrio parahaemolyticus
  Vibrio parahaemolyticus CDC_K4639G
gtgaactgccgcataggtagagaggatc

SEQ ID NO: 2639 - DNA, 28 bp, Vibrio parahaemolyticus
  Vibrio parahaemolyticus CDC_K4639G
tcatcactactgaaaagtagctgataac

SEQ ID NO: 2640 - DNA, 28 bp, Vibrio parahaemolyticus
  Vibrio parahaemolyticus CDC_K4639G
gaatactgccgaacaggtaggaggctca

SEQ ID NO: 2641 - DNA, 31 bp, Vibrio parahaemolyticus; identical to SEQ ID NO: 1876
  Vibrio parahaemolyticus CDC_K4639G

SEQ ID NO: 2642 - DNA, 31 bp, Vibrio parahaemolyticus; identical to SEQ ID NO: 1877
  Vibrio parahaemolyticus CDC_K4639G

SEQ ID NO: 2643 - DNA, 31 bp, Vibrio parahaemolyticus; identical to SEQ ID NO: 1878
  Vibrio parahaemolyticus CDC_K4639G

SEQ ID NO: 2644 - DNA, 28 bp, Vibrio parahaemolyticus
  Vibrio parahaemolyticus CDC_K5276
gtgaactgccgaataggtagctgataat

SEQ ID NO: 2645 - DNA, 28 bp, Vibrio parahaemolyticus
  Vibrio parahaemolyticus CDC_K5276
gtgaactgccgcataggtagagaggatc

SEQ ID NO: 2646 - DNA, 28 bp, Vibrio parahaemolyticus
  Vibrio parahaemolyticus CDC_K5276
tcatcactactgaaaagtagctgataac

SEQ ID NO: 2647 - DNA, 28 bp, Vibrio parahaemolyticus
  Vibrio parahaemolyticus CDC_K5276
gaatactgccgaacaggtaggaggctca

SEQ ID NO: 2648 - DNA, 31 bp, Vibrio parahaemolyticus; identical to SEQ ID NO: 1876
  Vibrio parahaemolyticus CDC_K5276

SEQ ID NO: 2649 - DNA, 31 bp, Vibrio parahaemolyticus; identical to SEQ ID NO: 1877
  Vibrio parahaemolyticus CDC_K5276

SEQ ID NO: 2650 - DNA, 31 bp, Vibrio parahaemolyticus; identical to SEQ ID NO: 1878
  Vibrio parahaemolyticus CDC_K5276

SEQ ID NO: 2651 - DNA, 28 bp, Vibrio parahaemolyticus
  Vibrio parahaemolyticus CDC_K5582
gtgaactgccgaataggtagctgataat

SEQ ID NO: 2652 - DNA, 28 bp, Vibrio parahaemolyticus
  Vibrio parahaemolyticus CDC_K5582
gtgaactgccgcataggtagagaggatc

SEQ ID NO: 2653 - DNA, 28 bp, Vibrio parahaemolyticus
  Vibrio parahaemolyticus CDC_K5582
tcatcactactgaaaagtagctgataac

SEQ ID NO: 2654 - DNA, 28 bp, Vibrio parahaemolyticus
  Vibrio parahaemolyticus CDC_K5582
gaatactgccgaacaggtaggaggctca

SEQ ID NO: 2655 - DNA, 31 bp, Vibrio parahaemolyticus; identical to SEQ ID NO: 1876
  Vibrio parahaemolyticus CDC_K5582

SEQ ID NO: 2656 - DNA, 31 bp, Vibrio parahaemolyticus; identical to SEQ ID NO: 1877
  Vibrio parahaemolyticus CDC_K5582

SEQ ID NO: 2657 - DNA, 31 bp, Vibrio parahaemolyticus; identical to SEQ ID NO: 1878
  Vibrio parahaemolyticus CDC_K5582

SEQ ID NO: 2658 - DNA, 28 bp, Vibrio parahaemolyticus
  Vibrio parahaemolyticus CDC_K5618
gtgaactgccgaataggtagctgataat

SEQ ID NO: 2659 - DNA, 28 bp, Vibrio parahaemolyticus
  Vibrio parahaemolyticus CDC_K5618
gtgaactgccgcataggtagagaggatc

SEQ ID NO: 2660 - DNA, 28 bp, Vibrio parahaemolyticus
  Vibrio parahaemolyticus CDC_K5618
tcatcactactgaaaagtagctgataac

SEQ ID NO: 2661 - DNA, 28 bp, Vibrio parahaemolyticus
  Vibrio parahaemolyticus CDC_K5618
gaatactgccgaacaggtaggaggctca

SEQ ID NO: 2662 - DNA, 31 bp, Vibrio parahaemolyticus; identical to SEQ ID NO: 1876
  Vibrio parahaemolyticus CDC_K5618

SEQ ID NO: 2663 - DNA, 31 bp, Vibrio parahaemolyticus; identical to SEQ ID NO: 1877
  Vibrio parahaemolyticus CDC_K5618

SEQ ID NO: 2664 - DNA, 31 bp, Vibrio parahaemolyticus; identical to SEQ ID NO: 1970
  Vibrio parahaemolyticus CDC_K5618

SEQ ID NO: 2665 - DNA, 28 bp, Vibrio parahaemolyticus
  Vibrio parahaemolyticus GCSL_R130
gtgaacttccgaataggtagctgataat

SEQ ID NO: 2666 - DNA, 28 bp, Vibrio parahaemolyticus
  Vibrio parahaemolyticus GCSL_R130
gtgaactgccgcataggtagagaggatc

SEQ ID NO: 2667 - DNA, 28 bp, Vibrio parahaemolyticus
  Vibrio parahaemolyticus GCSL_R130
tcattactactgaaaagtagctgataac

SEQ ID NO: 2668 - DNA, 28 bp, Vibrio parahaemolyticus
  Vibrio parahaemolyticus GCSL_R130
gaatactgccgaacaggtaggaggctca

SEQ ID NO: 2669 - DNA, 31 bp, Vibrio parahaemolyticus; identical to SEQ ID NO: 2358
  Vibrio parahaemolyticus GCSL_R130

SEQ ID NO: 2670 - DNA, 31 bp, Vibrio parahaemolyticus; identical to SEQ ID NO: 1877
  Vibrio parahaemolyticus GCSL_R130

SEQ ID NO: 2671 - DNA, 31 bp, Vibrio parahaemolyticus; identical to SEQ ID NO: 1878
  Vibrio parahaemolyticus GCSL_R130

SEQ ID NO: 2672 - DNA, 28 bp, Vibrio parahaemolyticus
  Vibrio parahaemolyticus CFSAN026729
gtgaactgccgaataggtagctgataat

SEQ ID NO: 2673 - DNA, 28 bp, Vibrio parahaemolyticus
  Vibrio parahaemolyticus CFSAN026729
gtgaactgccgcataggtagagaggatc

SEQ ID NO: 2674 - DNA, 28 bp, Vibrio parahaemolyticus
  Vibrio parahaemolyticus CFSAN026729
tcatcactactgaaaagtagctgataac

SEQ ID NO: 2675 - DNA, 28 bp, Vibrio parahaemolyticus
  Vibrio parahaemolyticus CFSAN026729
gaatactgccgaacaggtaggaggctca

SEQ ID NO: 2676 - DNA, 31 bp, Vibrio parahaemolyticus; identical to SEQ ID NO: 1876
  Vibrio parahaemolyticus CFSAN026729

SEQ ID NO: 2677 - DNA, 31 bp, Vibrio parahaemolyticus; identical to SEQ ID NO: 1877
  Vibrio parahaemolyticus CFSAN026729

SEQ ID NO: 2678 - DNA, 31 bp, Vibrio parahaemolyticus; identical to SEQ ID NO: 1878
  Vibrio parahaemolyticus CFSAN026729

SEQ ID NO: 2679 - DNA, 28 bp, Vibrio parahaemolyticus
  Vibrio parahaemolyticus CFSAN001615
gtgaactgccgaataggtagctgataat

SEQ ID NO: 2680 - DNA, 28 bp, Vibrio parahaemolyticus
  Vibrio parahaemolyticus CFSAN001615
gtgaactgccgcataggtagagaggatc

SEQ ID NO: 2681 - DNA, 28 bp, Vibrio parahaemolyticus
  Vibrio parahaemolyticus CFSAN001615
tcatcactactgaaaagtagctgataac

SEQ ID NO: 2682 - DNA, 28 bp, Vibrio parahaemolyticus
  Vibrio parahaemolyticus CFSAN001615
gaatactgccgaacaggtaggaggctca

SEQ ID NO: 2683 - DNA, 31 bp, Vibrio parahaemolyticus; identical to SEQ ID NO: 1876
  Vibrio parahaemolyticus CFSAN001615

SEQ ID NO: 2684 - DNA, 31 bp, Vibrio parahaemolyticus; identical to SEQ ID NO: 1877
  Vibrio parahaemolyticus CFSAN001615

SEQ ID NO: 2685 - DNA, 31 bp, Vibrio parahaemolyticus; identical to SEQ ID NO: 1878
  Vibrio parahaemolyticus CFSAN001615

SEQ ID NO: 2686 - DNA, 28 bp, Vibrio parahaemolyticus
  Vibrio parahaemolyticus CFSAN001604
gtgaactgccgaataggtagctgataat

SEQ ID NO: 2687 - DNA, 28 bp, Vibrio parahaemolyticus
  Vibrio parahaemolyticus CFSAN001604
gtgaactgccgcataggtagagaggatc

SEQ ID NO: 2688 - DNA, 28 bp, Vibrio parahaemolyticus
  Vibrio parahaemolyticus CFSAN001604
tcatcactactgaaaagtagctgataac

SEQ ID NO: 2689 - DNA, 28 bp, Vibrio parahaemolyticus
  Vibrio parahaemolyticus CFSAN001604
gaatactgccgaacaggtaggaggctca

SEQ ID NO: 2690 - DNA, 31 bp, Vibrio parahaemolyticus; identical to SEQ ID NO: 1876
  Vibrio parahaemolyticus CFSAN001604

SEQ ID NO: 2691 - DNA, 31 bp, Vibrio parahaemolyticus; identical to SEQ ID NO: 1877
  Vibrio parahaemolyticus CFSAN001604

SEQ ID NO: 2692 - DNA, 31 bp, Vibrio parahaemolyticus; identical to SEQ ID NO: 1878
  Vibrio parahaemolyticus CFSAN001604

SEQ ID NO: 2693 - DNA, 28 bp, Vibrio parahaemolyticus
  Vibrio parahaemolyticus CFSAN018769
gtgaactgccgaataggtagctgataat

SEQ ID NO: 2694 - DNA, 28 bp, Vibrio parahaemolyticus
  Vibrio parahaemolyticus CFSAN018769
gtgaactgccgcataggtagagaggatc

SEQ ID NO: 2695 - DNA, 28 bp, Vibrio parahaemolyticus
  Vibrio parahaemolyticus CFSAN018769
tcatcactactgaaaagtagctgataac

SEQ ID NO: 2696 - DNA, 28 bp, Vibrio parahaemolyticus
  Vibrio parahaemolyticus CFSAN018769
gaatactgccgaacaggtaggaggctca

SEQ ID NO: 2697 - DNA, 31 bp, Vibrio parahaemolyticus; identical to SEQ ID NO: 1876
  Vibrio parahaemolyticus CFSAN018769

SEQ ID NO: 2698 - DNA, 31 bp, Vibrio parahaemolyticus; identical to SEQ ID NO: 1877
  Vibrio parahaemolyticus CFSAN018769

SEQ ID NO: 2699 - DNA, 31 bp, Vibrio parahaemolyticus; identical to SEQ ID NO: 1878
  Vibrio parahaemolyticus CFSAN018769

SEQ ID NO: 2700 - DNA, 28 bp, Vibrio parahaemolyticus
  Vibrio parahaemolyticus CFSAN018775
gtgaactgccgaataggtagctgataat

SEQ ID NO: 2701 - DNA, 28 bp, Vibrio parahaemolyticus
  Vibrio parahaemolyticus CFSAN018775
gtgaactgccgcataggtagagaggatc

SEQ ID NO: 2702 - DNA, 28 bp, Vibrio parahaemolyticus
  Vibrio parahaemolyticus CFSAN018775
tcatcactactgaaaagtagctgataac

SEQ ID NO: 2703 - DNA, 28 bp, Vibrio parahaemolyticus
  Vibrio parahaemolyticus CFSAN018775
gaatactgccgaacaggtaggaggctca

SEQ ID NO: 2704 - DNA, 31 bp, Vibrio parahaemolyticus; identical to SEQ ID NO: 1876
  Vibrio parahaemolyticus CFSAN018775

SEQ ID NO: 2705 - DNA, 31 bp, Vibrio parahaemolyticus; identical to SEQ ID NO: 1877
  Vibrio parahaemolyticus CFSAN018775

SEQ ID NO: 2706 - DNA, 31 bp, Vibrio parahaemolyticus; identical to SEQ ID NO: 1878
  Vibrio parahaemolyticus CFSAN018775

SEQ ID NO: 2707 - DNA, 28 bp, Vibrio parahaemolyticus
  Vibrio parahaemolyticus MAVP-A
gtgaactgccgaataggtagctgataat

SEQ ID NO: 2708 - DNA, 28 bp, Vibrio parahaemolyticus
  Vibrio parahaemolyticus MAVP-A
gtgaactgccgcataggtagagaggatc

SEQ ID NO: 2709 - DNA, 28 bp, Vibrio parahaemolyticus
  Vibrio parahaemolyticus MAVP-A
tcatcactactgaaaagtagctgataac

SEQ ID NO: 2710 - DNA, 28 bp, Vibrio parahaemolyticus
  Vibrio parahaemolyticus MAVP-A
gaatactgccgaacaggtaggaggctca

SEQ ID NO: 2711 - DNA, 31 bp, Vibrio parahaemolyticus; identical to SEQ ID NO: 1876
  Vibrio parahaemolyticus MAVP-A

SEQ ID NO: 2712 - DNA, 31 bp, Vibrio parahaemolyticus; identical to SEQ ID NO: 1877
  Vibrio parahaemolyticus MAVP-A

SEQ ID NO: 2713 - DNA, 31 bp, Vibrio parahaemolyticus; identical to SEQ ID NO: 1878
  Vibrio parahaemolyticus MAVP-A

SEQ ID NO: 2714 - DNA, 28 bp, Vibrio parahaemolyticus
  Vibrio parahaemolyticus MAVP-P
gtgaactgccgaataggtagctgataat

SEQ ID NO: 2715 - DNA, 28 bp, Vibrio parahaemolyticus
  Vibrio parahaemolyticus MAVP-P
gtgaactgccgcataggtagagaggatc

SEQ ID NO: 2716 - DNA, 28 bp, Vibrio parahaemolyticus
  Vibrio parahaemolyticus MAVP-P
tcatcactactgaaaagtagctgataac

SEQ ID NO: 2717 - DNA, 28 bp, Vibrio parahaemolyticus
  Vibrio parahaemolyticus MAVP-P
gaatactgccgaacaggtaggaggctca

SEQ ID NO: 2718 - DNA, 31 bp, Vibrio parahaemolyticus; identical to SEQ ID NO: 1876
  Vibrio parahaemolyticus MAVP-P

SEQ ID NO: 2719 - DNA, 31 bp, Vibrio parahaemolyticus; identical to SEQ ID NO: 1877
  Vibrio parahaemolyticus MAVP-P

SEQ ID NO: 2720 - DNA, 31 bp, Vibrio parahaemolyticus; identical to SEQ ID NO: 1878
  Vibrio parahaemolyticus MAVP-P

SEQ ID NO: 2721 - DNA, 28 bp, Vibrio parahaemolyticus
  Vibrio parahaemolyticus MAVP30
gtgaactgccgaataggtagctgataat

SEQ ID NO: 2722 - DNA, 28 bp, Vibrio parahaemolyticus
  Vibrio parahaemolyticus MAVP30
gtgaactgccgcataggtagagaggatc

SEQ ID NO: 2723 - DNA, 28 bp, Vibrio parahaemolyticus
  Vibrio parahaemolyticus MAVP30
tcatcactactgaaaagtagctgataac

SEQ ID NO: 2724 - DNA, 28 bp, Vibrio parahaemolyticus
  Vibrio parahaemolyticus MAVP30
gaatactgccgaacaggtaggaggctca

SEQ ID NO: 2725 - DNA, 31 bp, Vibrio parahaemolyticus; identical to SEQ ID NO: 1876
  Vibrio parahaemolyticus MAVP30

SEQ ID NO: 2726 - DNA, 31 bp, Vibrio parahaemolyticus; identical to SEQ ID NO: 1877
  Vibrio parahaemolyticus MAVP30

SEQ ID NO: 2727 - DNA, 31 bp, Vibrio parahaemolyticus; identical to SEQ ID NO: 1878
  Vibrio parahaemolyticus MAVP30

SEQ ID NO: 2728 - DNA, 28 bp, Vibrio parahaemolyticus
  Vibrio parahaemolyticus MAVP-90
gtgaactgccgaataggtagctgataat

SEQ ID NO: 2729 - DNA, 28 bp, Vibrio parahaemolyticus
  Vibrio parahaemolyticus MAVP-90
gtgaactgccgcataggtagagaggatc

SEQ ID NO: 2730 - DNA, 28 bp, Vibrio parahaemolyticus
  Vibrio parahaemolyticus MAVP-90
tcatcactactgaaaagtagctgataac

SEQ ID NO: 2731 - DNA, 28 bp, Vibrio parahaemolyticus
  Vibrio parahaemolyticus MAVP-90
gaatactgccgaacaggtaggaggctca

SEQ ID NO: 2732 - DNA, 31 bp, Vibrio parahaemolyticus; identical to SEQ ID NO: 1876
  Vibrio parahaemolyticus MAVP-90

SEQ ID NO: 2733 - DNA, 31 bp, Vibrio parahaemolyticus; identical to SEQ ID NO: 1877
  Vibrio parahaemolyticus MAVP-90

SEQ ID NO: 2734 - DNA, 31 bp, Vibrio parahaemolyticus; identical to SEQ ID NO: 1878
  Vibrio parahaemolyticus MAVP-90

SEQ ID NO: 2735 - DNA, 28 bp, Vibrio parahaemolyticus
  Vibrio parahaemolyticus MAVP-50
gtgaactgccgaataggtagctgataat

SEQ ID NO: 2736 - DNA, 28 bp, Vibrio parahaemolyticus
  Vibrio parahaemolyticus MAVP-50
gtgaactgccgcataggtagagaggatc

SEQ ID NO: 2737 - DNA, 28 bp, Vibrio parahaemolyticus
  Vibrio parahaemolyticus MAVP-50
tcatcactactgaaaagtagctgataac

SEQ ID NO: 2738 - DNA, 28 bp, Vibrio parahaemolyticus
  Vibrio parahaemolyticus MAVP-50
gaatactgccgaacaggtaggaggctca

SEQ ID NO: 2739 - DNA, 31 bp, Vibrio parahaemolyticus; identical to SEQ ID NO: 1876
  Vibrio parahaemolyticus MAVP-50

SEQ ID NO: 2740 - DNA, 31 bp, Vibrio parahaemolyticus; identical to SEQ ID NO: 1877
  Vibrio parahaemolyticus MAVP-50

SEQ ID NO: 2741 - DNA, 31 bp, Vibrio parahaemolyticus; identical to SEQ ID NO: 1970
  Vibrio parahaemolyticus MAVP-50

SEQ ID NO: 2742 - DNA, 28 bp, Vibrio parahaemolyticus
  Vibrio parahaemolyticus CDC-AM43539
gtgaactgccgaataggtagctgataat

SEQ ID NO: 2743 - DNA, 28 bp, Vibrio parahaemolyticus
  Vibrio parahaemolyticus CDC-AM43539
gtgaactgccgcataggtagagaggatc

SEQ ID NO: 2744 - DNA, 28 bp, Vibrio parahaemolyticus
  Vibrio parahaemolyticus CDC-AM43539
tcatcactactgaaaagtagctgataac

SEQ ID NO: 2745 - DNA, 28 bp, Vibrio parahaemolyticus
  Vibrio parahaemolyticus CDC-AM43539
gaatactgccgaacaggtaggaggctca

SEQ ID NO: 2746 - DNA, 31 bp, Vibrio parahaemolyticus; identical to SEQ ID NO: 1876
  Vibrio parahaemolyticus CDC-AM43539

SEQ ID NO: 2747 - DNA, 31 bp, Vibrio parahaemolyticus; identical to SEQ ID NO: 1877
  Vibrio parahaemolyticus CDC-AM43539

SEQ ID NO: 2748 - DNA, 31 bp, Vibrio parahaemolyticus; identical to SEQ ID NO: 1878
  Vibrio parahaemolyticus CDC-AM43539

SEQ ID NO: 2749 - DNA, 28 bp, Vibrio lentus
  Vibrio lentus 10N.286.46.B8
gtgaactgccgaataggtagctgataat

SEQ ID NO: 2750 - DNA, 28 bp, Vibrio lentus
  Vibrio lentus 10N.286.46.B8
gtgaactgcagagtaggtaggcccccac

SEQ ID NO: 2751 - DNA, 28 bp, Vibrio lentus
  Vibrio lentus 10N.286.46.B8
tcaaacttactgaaaagtagttgataac

SEQ ID NO: 2752 - DNA, 28 bp, Vibrio lentus
  Vibrio lentus 10N.286.46.B8
attaactgctgaataagtagacacttta

SEQ ID NO: 2753 - DNA, 33 bp, Vibrio lentus
  Vibrio lentus 10N.286.46.B8
actttgacgtcgatgtggtggtctttgatatgc

SEQ ID NO: 2754 - DNA, 32 bp, Vibrio lentus
  Vibrio lentus 10N.286.46.B8
taagaatccgactactggtaataagtttggga

SEQ ID NO: 2755 - DNA, 32 bp, Vibrio lentus
  Vibrio lentus 10N.286.46.B8
aaacgaaccactttcatccaagttcaagagca

SEQ ID NO: 2756 - DNA, 32 bp, Vibrio lentus
  Vibrio lentus 10N.286.46.B8
aagcgtacgactttcatccgtgtacaagagca

SEQ ID NO: 2757 - DNA, 28 bp, Vibrio cyclitrophicus
  Vibrio cyclitrophicus 10N.261.55.A11
gtgaactgccgaataggtagctgataat

SEQ ID NO: 2758 - DNA, 28 bp, Vibrio cyclitrophicus
  Vibrio cyclitrophicus 10N.261.55.A11
gtgaactgccgaataggtaggagaccat

SEQ ID NO: 2759 - DNA, 33 bp, Vibrio cyclitrophicus
  Vibrio cyclitrophicus 10N.261.55.A11
atttcagaatttgcctccgagtctcacatttat

SEQ ID NO: 2760 - DNA, 28 bp, Photobacterium sp.
  Photobacterium sp. GB-72
gtgaactgccgagtaggtagctgataat

SEQ ID NO: 2761 - DNA, 28 bp, Photobacterium sp.
  Photobacterium sp. GB-72
gtgaactgccgagtaggtagagctcgtc

SEQ ID NO: 2762 - DNA, 28 bp, Photobacterium sp.
  Photobacterium sp. GB-72
ttattactactgaaaagtagttgataat

SEQ ID NO: 2763 - DNA, 28 bp, Photobacterium sp.
  Photobacterium sp. GB-72
atttactgctgaataagtagataactac

SEQ ID NO: 2764 - DNA, 32 bp, Photobacterium sp.
  Photobacterium sp. GB-72
tttaccatgttgatacacattaaaaaggagtc

SEQ ID NO: 2765 - DNA, 32 bp, Photobacterium sp.
  Photobacterium sp. GB-72
aaacgtaccaccttcattcgagtacaaggaca

SEQ ID NO: 2766 - DNA, 32 bp, Photobacterium sp.
  Photobacterium sp. GB-72
aagcgtacgacatttattcgagtacaagagca

SEQ ID NO: 2767 - DNA, 28 bp, Photobacterium leiognathi
  Photobacterium leiognathi ATCC 25521
acaaactgccgaataggtagctgacaaa

SEQ ID NO: 2768 - DNA, 28 bp, Photobacterium leiognathi
  Photobacterium leiognathi ATCC 25521
gattactgccgaataggtagatatttaa

SEQ ID NO: 2769 - DNA, 28 bp, Photobacterium leiognathi
  Photobacterium leiognathi ATCC 25521
gttaactgccgagtaggtagctgataag

SEQ ID NO: 2770 - DNA, 28 bp, Photobacterium leiognathi
  Photobacterium leiognathi ATCC 25521
gttaactgccgagtaggtagctgaaaat

SEQ ID NO: 2771 - DNA, 28 bp, Photobacterium leiognathi
  Photobacterium leiognathi ATCC 25521
gatgactgccgagtaggtagctgataag

SEQ ID NO: 2772 - DNA, 31 bp, Photobacterium leiognathi
  Photobacterium leiognathi ATCC 25521
caaataaaaaatatttttcgacctccaaacg

SEQ ID NO: 2773 - DNA, 32 bp, Photobacterium leiognathi
  Photobacterium leiognathi ATCC 25521
taaacttcaagttagggcgtagtgccgacacc

SEQ ID NO: 2774 - DNA, 32 bp, Photobacterium leiognathi
  Photobacterium leiognathi ATCC 25521
ttactcaccattgctcatttatctgacattgg

SEQ ID NO: 2775 - DNA, 32 bp, Photobacterium leiognathi
  Photobacterium leiognathi ATCC 25521
ttactcactattgctcgtttatcttacatcgg

SEQ ID NO: 2776 - DNA, 28 bp, Vibrio sp.
  Vibrio sp. 10N.222.48.A9
gtgtactgccgaataggtagctgataat

SEQ ID NO: 2777 - DNA, 28 bp, Vibrio sp.
  Vibrio sp. 10N.222.48.A9
gagaactgccgaataggtaggagaccat

SEQ ID NO: 2778 - DNA, 32 bp, Vibrio sp.
  Vibrio sp. 10N.222.48.A9
aaactgatgtcagtaaatttcaactgtaccaa

SEQ ID NO: 2779 - DNA, 28 bp, Vibrio parahaemolyticus
  Vibrio parahaemolyticus G1_6
gtgaactgccgaataggtagctgataat

SEQ ID NO: 2780 - DNA, 28 bp, Vibrio parahaemolyticus
  Vibrio parahaemolyticus G1_6
gtgaactgccgcataggtagagagaatc

SEQ ID NO: 2781 - DNA, 28 bp, Vibrio parahaemolyticus
  Vibrio parahaemolyticus G1_6
tcattactactaaaaagtagctgataac

SEQ ID NO: 2782 - DNA, 28 bp, Vibrio parahaemolyticus
  Vibrio parahaemolyticus G1_6
gaatactgccgaacaggtaggaggctca

SEQ ID NO: 2783 - DNA, 32 bp, Vibrio parahaemolyticus; identical to SEQ ID NO: 1946
  Vibrio parahaemolyticus G1_6

SEQ ID NO: 2784 - DNA, 31 bp, Vibrio parahaemolyticus; identical to SEQ ID NO: 1947
  Vibrio parahaemolyticus G1_6

SEQ ID NO: 2785 - DNA, 31 bp, Vibrio parahaemolyticus; identical to SEQ ID NO: 1877
  Vibrio parahaemolyticus G1_6

SEQ ID NO: 2786 - DNA, 31 bp, Vibrio parahaemolyticus; identical to SEQ ID NO: 1878
  Vibrio parahaemolyticus G1_6

SEQ ID NO: 2787 - DNA, 28 bp, Vibrio parahaemolyticus
  Vibrio parahaemolyticus F3_7
gtgaactgccgaataggtagctgataat

SEQ ID NO: 2788 - DNA, 28 bp, Vibrio parahaemolyticus
  Vibrio parahaemolyticus F3_7
gtgaactgccgcataggtagagagaatc

SEQ ID NO: 2789 - DNA, 28 bp, Vibrio parahaemolyticus
  Vibrio parahaemolyticus F3_7
tcattactactaaaaagtagctgataac

SEQ ID NO: 2790 - DNA, 28 bp, Vibrio parahaemolyticus
  Vibrio parahaemolyticus F3_7
gaatactgccgaacaggtaggaggctca

SEQ ID NO: 2791 - DNA, 32 bp, Vibrio parahaemolyticus; identical to SEQ ID NO: 1946
  Vibrio parahaemolyticus F3_7

SEQ ID NO: 2792 - DNA, 31 bp, Vibrio parahaemolyticus; identical to SEQ ID NO: 1947
  Vibrio parahaemolyticus F3_7

SEQ ID NO: 2793 - DNA, 31 bp, Vibrio parahaemolyticus; identical to SEQ ID NO: 1877
  Vibrio parahaemolyticus F3_7

SEQ ID NO: 2794 - DNA, 31 bp, Vibrio parahaemolyticus; identical to SEQ ID NO: 1878
  Vibrio parahaemolyticus F3_7

SEQ ID NO: 2795 - DNA, 28 bp, Vibrio parahaemolyticus
  Vibrio parahaemolyticus F2_9
gtgaactgccgaataggtagctgataat

SEQ ID NO: 2796 - DNA, 28 bp, Vibrio parahaemolyticus
  Vibrio parahaemolyticus F2_9
gtgaactgccgcataggtagagagaatc

SEQ ID NO: 2797 - DNA, 28 bp, Vibrio parahaemolyticus
  Vibrio parahaemolyticus F2_9
tcattactactaaaaagtagctgataac

SEQ ID NO: 2798 - DNA, 28 bp, Vibrio parahaemolyticus
  Vibrio parahaemolyticus F2_9
gaatactgccgaacaggtaggaggctca

SEQ ID NO: 2799 - DNA, 32 bp, Vibrio parahaemolyticus; identical to SEQ ID NO: 1946
  Vibrio parahaemolyticus F2_9

SEQ ID NO: 2800 - DNA, 31 bp, Vibrio parahaemolyticus; identical to SEQ ID NO: 1947
  Vibrio parahaemolyticus F2_9

SEQ ID NO: 2801 - DNA, 31 bp, Vibrio parahaemolyticus; identical to SEQ ID NO: 1877
  Vibrio parahaemolyticus F2_9

SEQ ID NO: 2802 - DNA, 31 bp, Vibrio parahaemolyticus; identical to SEQ ID NO: 1878
  Vibrio parahaemolyticus F2_9

SEQ ID NO: 2803 - DNA, 28 bp, Vibrio parahaemolyticus
  Vibrio parahaemolyticus E3_10
gtgaactgccgaataggtagctgataat

SEQ ID NO: 2804 - DNA, 28 bp, Vibrio parahaemolyticus
  Vibrio parahaemolyticus E3_10
gtgaactgccgaataggtagagaggatc

SEQ ID NO: 2805 - DNA, 28 bp, Vibrio parahaemolyticus
  Vibrio parahaemolyticus E3_10
tcctcactactgaaaagtagctgataac

SEQ ID NO: 2806 - DNA, 28 bp, Vibrio parahaemolyticus
  Vibrio parahaemolyticus E3_10
gaatactgccgaacaggtaggaggctca

SEQ ID NO: 2807 - DNA, 32 bp, Vibrio parahaemolyticus
  Vibrio parahaemolyticus E3_10
aaactgcatgtgggtttgtaagggagcaagtc

SEQ ID NO: 2808 - DNA, 31 bp, Vibrio parahaemolyticus; identical to SEQ ID NO: 1877
  Vibrio parahaemolyticus E3_10

SEQ ID NO: 2809 - DNA, 31 bp, Vibrio parahaemolyticus; identical to SEQ ID NO: 1878
  Vibrio parahaemolyticus E3_10

SEQ ID NO: 2810 - DNA, 28 bp, Vibrio parahaemolyticus
  Vibrio parahaemolyticus D7_4
gtgaactgccgaataggtagctgataat

SEQ ID NO: 2811 - DNA, 28 bp, Vibrio parahaemolyticus
  Vibrio parahaemolyticus D7_4
gtgaactgccgcataggtagagaggagc

SEQ ID NO: 2812 - DNA, 28 bp, Vibrio parahaemolyticus
  Vibrio parahaemolyticus D7_4
tcattactactgaaaagtagctgatcac

SEQ ID NO: 2813 - DNA, 28 bp, Vibrio parahaemolyticus
  Vibrio parahaemolyticus D7_4
gaatactgccgaacaggtaggaggctca

SEQ ID NO: 2814 - DNA, 32 bp, Vibrio parahaemolyticus
  Vibrio parahaemolyticus D7_4
aagttatccatcatcgatatcacaccatgcgt

SEQ ID NO: 2815 - DNA, 31 bp, Vibrio parahaemolyticus; identical to SEQ ID NO: 1877
  Vibrio parahaemolyticus D7_4

SEQ ID NO: 2816 - DNA, 31 bp, Vibrio parahaemolyticus; identical to SEQ ID NO: 1878
  Vibrio parahaemolyticus D7_4

SEQ ID NO: 2817 - DNA, 28 bp, Vibrio parahaemolyticus
  Vibrio parahaemolyticus VP090004
gtgaactgccgaataggtagctgataat

SEQ ID NO: 2818 - DNA, 28 bp, Vibrio parahaemolyticus
  Vibrio parahaemolyticus VP090004
gtgaactgccgcataggtagagagaatc

SEQ ID NO: 2819 - DNA, 28 bp, Vibrio parahaemolyticus
  Vibrio parahaemolyticus VP090004
tcattactactaaaaagtagctgataac

SEQ ID NO: 2820 - DNA, 28 bp, Vibrio parahaemolyticus
  Vibrio parahaemolyticus VP090004
gaatactgccgaacaggtaggaggctca

SEQ ID NO: 2821 - DNA, 32 bp, Vibrio parahaemolyticus; identical to SEQ ID NO: 2035
  Vibrio parahaemolyticus VP090004

SEQ ID NO: 2822 - DNA, 31 bp, Vibrio parahaemolyticus; identical to SEQ ID NO: 1947
  Vibrio parahaemolyticus VP090004

SEQ ID NO: 2823 - DNA, 31 bp, Vibrio parahaemolyticus; identical to SEQ ID NO: 1877
  Vibrio parahaemolyticus VP090004

SEQ ID NO: 2824 - DNA, 31 bp, Vibrio parahaemolyticus; identical to SEQ ID NO: 1878
  Vibrio parahaemolyticus VP090004

SEQ ID NO: 2825 - DNA, 28 bp, Vibrio parahaemolyticus
  Vibrio parahaemolyticus VP170075
gtgaactgccgaataggtagctgataat

SEQ ID NO: 2826 - DNA, 28 bp, Vibrio parahaemolyticus
  Vibrio parahaemolyticus VP170075
gtgaactgccgcataggtagagagaatc

SEQ ID NO: 2827 - DNA, 28 bp, Vibrio parahaemolyticus
  Vibrio parahaemolyticus VP170075
tcattactactaaaaagtagctgataac

SEQ ID NO: 2828 - DNA, 28 bp, Vibrio parahaemolyticus
  Vibrio parahaemolyticus VP170075
gaatactgccgaacaggtaggaggctca

SEQ ID NO: 2829 - DNA, 32 bp, Vibrio parahaemolyticus; identical to SEQ ID NO: 2035
  Vibrio parahaemolyticus VP170075

SEQ ID NO: 2830 - DNA, 31 bp, Vibrio parahaemolyticus; identical to SEQ ID NO: 1947
  Vibrio parahaemolyticus VP170075

SEQ ID NO: 2831 - DNA, 31 bp, Vibrio parahaemolyticus; identical to SEQ ID NO: 1877
  Vibrio parahaemolyticus VP170075

SEQ ID NO: 2832 - DNA, 31 bp, Vibrio parahaemolyticus; identical to SEQ ID NO: 1878
  Vibrio parahaemolyticus VP170075

SEQ ID NO: 2833 - DNA, 28 bp, Vibrio parahaemolyticus
  Vibrio parahaemolyticus VP161603
gtgaactgccgaataggtagctgataat

SEQ ID NO: 2834 - DNA, 28 bp, Vibrio parahaemolyticus
  Vibrio parahaemolyticus VP161603
gtgaactgccgcataggtagagagaatc

SEQ ID NO: 2835 - DNA, 28 bp, Vibrio parahaemolyticus
  Vibrio parahaemolyticus VP161603
tcattactactaaaaagtagctgataac

SEQ ID NO: 2836 - DNA, 28 bp, Vibrio parahaemolyticus
  Vibrio parahaemolyticus VP161603
gaatactgccgaacaggtaggaggctca

SEQ ID NO: 2837 - DNA, 32 bp, Vibrio parahaemolyticus; identical to SEQ ID NO: 2035
  Vibrio parahaemolyticus VP161603

SEQ ID NO: 2838 - DNA, 31 bp, Vibrio parahaemolyticus; identical to SEQ ID NO: 1947
  Vibrio parahaemolyticus VP161603

SEQ ID NO: 2839 - DNA, 31 bp, Vibrio parahaemolyticus; identical to SEQ ID NO: 1877
  Vibrio parahaemolyticus VP161603

SEQ ID NO: 2840 - DNA, 31 bp, Vibrio parahaemolyticus; identical to SEQ ID NO: 1878
  Vibrio parahaemolyticus VP161603

SEQ ID NO: 2841 - DNA, 28 bp, Vibrio parahaemolyticus
  Vibrio parahaemolyticus VP162180
gtgaactgccgaataggtagctgataat

SEQ ID NO: 2842 - DNA, 28 bp, Vibrio parahaemolyticus
  Vibrio parahaemolyticus VP162180
gtgaactgccgcataggtagagagaatc

SEQ ID NO: 2843 - DNA, 28 bp, Vibrio parahaemolyticus
  Vibrio parahaemolyticus VP162180
tcattactactaaaaagtagctgataac

SEQ ID NO: 2844 - DNA, 28 bp, Vibrio parahaemolyticus
  Vibrio parahaemolyticus VP162180
gaatactgccgaacaggtaggaggctca

SEQ ID NO: 2845 - DNA, 32 bp, Vibrio parahaemolyticus; identical to SEQ ID NO: 2035
  Vibrio parahaemolyticus VP162180

SEQ ID NO: 2846 - DNA, 31 bp, Vibrio parahaemolyticus; identical to SEQ ID NO: 1947
  Vibrio parahaemolyticus VP162180

SEQ ID NO: 2847 - DNA, 31 bp, Vibrio parahaemolyticus; identical to SEQ ID NO: 1877
  Vibrio parahaemolyticus VP162180

SEQ ID NO: 2848 - DNA, 31 bp, Vibrio parahaemolyticus; identical to SEQ ID NO: 1878
  Vibrio parahaemolyticus VP162180

SEQ ID NO: 2849 - DNA, 28 bp, Vibrio parahaemolyticus
  Vibrio parahaemolyticus HZ13-088
gtgaactgccgaataggtagctgataat

SEQ ID NO: 2850 - DNA, 28 bp, Vibrio parahaemolyticus
  Vibrio parahaemolyticus HZ13-088
gtgaactgccgcataggtagagagaatc

SEQ ID NO: 2851 - DNA, 28 bp, Vibrio parahaemolyticus
  Vibrio parahaemolyticus HZ13-088
tcattactactaaaaagtagctgataac

SEQ ID NO: 2852 - DNA, 28 bp, Vibrio parahaemolyticus
  Vibrio parahaemolyticus HZ13-088
gaatactgccgaacaggtaggaggctca

SEQ ID NO: 2853 - DNA, 32 bp, Vibrio parahaemolyticus; identical to SEQ ID NO: 2035
  Vibrio parahaemolyticus HZ13-088

SEQ ID NO: 2854 - DNA, 31 bp, Vibrio parahaemolyticus; identical to SEQ ID NO: 1947
  Vibrio parahaemolyticus HZ13-088

SEQ ID NO: 2855 - DNA, 31 bp, Vibrio parahaemolyticus; identical to SEQ ID NO: 1877
  Vibrio parahaemolyticus HZ13-088

SEQ ID NO: 2856 - DNA, 31 bp, Vibrio parahaemolyticus; identical to SEQ ID NO: 1878
  Vibrio parahaemolyticus HZ13-088

SEQ ID NO: 2857 - DNA, 28 bp, Vibrio parahaemolyticus
  Vibrio parahaemolyticus HZ02-J7
gtgaactgccgaataggtagctgataat

SEQ ID NO: 2858 - DNA, 28 bp, Vibrio parahaemolyticus
  Vibrio parahaemolyticus HZ02-J7
gtgaactgccgcataggtagagagaatc

SEQ ID NO: 2859 - DNA, 28 bp, Vibrio parahaemolyticus
  Vibrio parahaemolyticus HZ02-J7
tcattactactaaaaagtagctgataac

SEQ ID NO: 2860 - DNA, 28 bp, Vibrio parahaemolyticus
  Vibrio parahaemolyticus HZ02-J7
gaatactgccgaacaggtaggaggctca

SEQ ID NO: 2861 - DNA, 32 bp, Vibrio parahaemolyticus; identical to SEQ ID NO: 2035
  Vibrio parahaemolyticus HZ02-J7

SEQ ID NO: 2862 - DNA, 31 bp, Vibrio parahaemolyticus; identical to SEQ ID NO: 1947
  Vibrio parahaemolyticus HZ02-J7

SEQ ID NO: 2863 - DNA, 31 bp, Vibrio parahaemolyticus; identical to SEQ ID NO: 1877
  Vibrio parahaemolyticus HZ02-J7

SEQ ID NO: 2864 - DNA, 31 bp, Vibrio parahaemolyticus; identical to SEQ ID NO: 1878
  Vibrio parahaemolyticus HZ02-J7

SEQ ID NO: 2865 - DNA, 28 bp, Vibrio parahaemolyticus
  Vibrio parahaemolyticus AQ3810
gtgaactgccgaataggtagctgataat

SEQ ID NO: 2866 - DNA, 28 bp, Vibrio parahaemolyticus
  Vibrio parahaemolyticus AQ3810
gtgaactgccgcataggtagagagaatc

SEQ ID NO: 2867 - DNA, 28 bp, Vibrio parahaemolyticus
  Vibrio parahaemolyticus AQ3810
tcattactactaaaaagtagctgataac

SEQ ID NO: 2868 - DNA, 28 bp, Vibrio parahaemolyticus
  Vibrio parahaemolyticus AQ3810
gaatactgccgaacaggtaggaggctca

SEQ ID NO: 2869 - DNA, 32 bp, Vibrio parahaemolyticus; identical to SEQ ID NO: 2035
  Vibrio parahaemolyticus AQ3810

SEQ ID NO: 2870 - DNA, 31 bp, Vibrio parahaemolyticus; identical to SEQ ID NO: 1947
  Vibrio parahaemolyticus AQ3810

SEQ ID NO: 2871 - DNA, 31 bp, Vibrio parahaemolyticus; identical to SEQ ID NO: 1877
  Vibrio parahaemolyticus AQ3810

SEQ ID NO: 2872 - DNA, 31 bp, Vibrio parahaemolyticus; identical to SEQ ID NO: 1970
  Vibrio parahaemolyticus AQ3810

SEQ ID NO: 2873 - DNA, 28 bp, Vibrio parahaemolyticus
  Vibrio parahaemolyticus 10290
gtgaactgccgaataggtagctgataat

SEQ ID NO: 2874 - DNA, 28 bp, Vibrio parahaemolyticus
  Vibrio parahaemolyticus 10290
gtgaactgccgcataggtagagaggatc

SEQ ID NO: 2875 - DNA, 28 bp, Vibrio parahaemolyticus
  Vibrio parahaemolyticus 10290
tcatcactactgaaaagtagctgataac

SEQ ID NO: 2876 - DNA, 28 bp, Vibrio parahaemolyticus
  Vibrio parahaemolyticus 10290
gaatactgccgaacaggtaggaggctca

SEQ ID NO: 2877 - DNA, 31 bp, Vibrio parahaemolyticus; identical to SEQ ID NO: 1876
  Vibrio parahaemolyticus 10290

SEQ ID NO: 2878 - DNA, 31 bp, Vibrio parahaemolyticus; identical to SEQ ID NO: 1877
  Vibrio parahaemolyticus 10290

SEQ ID NO: 2879 - DNA, 31 bp, Vibrio parahaemolyticus; identical to SEQ ID NO: 1878
  Vibrio parahaemolyticus 10290

SEQ ID NO: 2880 - DNA, 28 bp, Vibrio parahaemolyticus
  Vibrio parahaemolyticus 50
gtgaactgccgaataggtagctgataat

SEQ ID NO: 2881 - DNA, 28 bp, Vibrio parahaemolyticus
  Vibrio parahaemolyticus 50
atgaactgccgaataggtagagaggagc

SEQ ID NO: 2882 - DNA, 28 bp, Vibrio parahaemolyticus
  Vibrio parahaemolyticus 50
tcattactacttaaaagtagctgataac

SEQ ID NO: 2883 - DNA, 28 bp, Vibrio parahaemolyticus
  Vibrio parahaemolyticus 50
gaatactgccgaacaggtaggaggctca

SEQ ID NO: 2884 - DNA, 31 bp, Vibrio parahaemolyticus; identical to SEQ ID NO: 1897
  Vibrio parahaemolyticus 50

SEQ ID NO: 2885 - DNA, 31 bp, Vibrio parahaemolyticus; identical to SEQ ID NO: 1877
  Vibrio parahaemolyticus 50

SEQ ID NO: 2886 - DNA, 31 bp, Vibrio parahaemolyticus; identical to SEQ ID NO: 1878
  Vibrio parahaemolyticus 50

SEQ ID NO: 2887 - DNA, 28 bp, Vibrio parahaemolyticus
  Vibrio parahaemolyticus S089
gtgaactgccgaataggtagctgataat

SEQ ID NO: 2888 - DNA, 28 bp, Vibrio parahaemolyticus
  Vibrio parahaemolyticus S089
gtgaactgccgcataggtagagagaatc

SEQ ID NO: 2889 - DNA, 28 bp, Vibrio parahaemolyticus
  Vibrio parahaemolyticus S089
tcattactactaaaaagtagctgataac

SEQ ID NO: 2890 - DNA, 28 bp, Vibrio parahaemolyticus
  Vibrio parahaemolyticus S089
gaatactgccgaacaggtaggaggctca

SEQ ID NO: 2891 - DNA, 32 bp, Vibrio parahaemolyticus; identical to SEQ ID NO: 1946
  Vibrio parahaemolyticus S089

SEQ ID NO: 2892 - DNA, 31 bp, Vibrio parahaemolyticus; identical to SEQ ID NO: 1947
  Vibrio parahaemolyticus S089

SEQ ID NO: 2893 - DNA, 31 bp, Vibrio parahaemolyticus; identical to SEQ ID NO: 1877
  Vibrio parahaemolyticus S089

SEQ ID NO: 2894 - DNA, 31 bp, Vibrio parahaemolyticus; identical to SEQ ID NO: 1878
  Vibrio parahaemolyticus S089

SEQ ID NO: 2895 - DNA, 28 bp, Vibrio parahaemolyticus
  Vibrio parahaemolyticus F3_4
gtgaactgccgaataggtagctgataat

SEQ ID NO: 2896 - DNA, 28 bp, Vibrio parahaemolyticus
  Vibrio parahaemolyticus F3_4
gtgaactgccgcataggtagagagaatc

SEQ ID NO: 2897 - DNA, 28 bp, Vibrio parahaemolyticus
  Vibrio parahaemolyticus F3_4
tcattactactaaaaagtagctgataac

SEQ ID NO: 2898 - DNA, 28 bp, Vibrio parahaemolyticus
  Vibrio parahaemolyticus F3_4
gaatactgccgaacaggtaggaggctca

SEQ ID NO: 2899 - DNA, 32 bp, Vibrio parahaemolyticus; identical to SEQ ID NO: 1946
  Vibrio parahaemolyticus F3_4

SEQ ID NO: 2900 - DNA, 31 bp, Vibrio parahaemolyticus; identical to SEQ ID NO: 1947
  Vibrio parahaemolyticus F3_4

SEQ ID NO: 2901 - DNA, 31 bp, Vibrio parahaemolyticus; identical to SEQ ID NO: 1877
  Vibrio parahaemolyticus F3_4

SEQ ID NO: 2902 - DNA, 31 bp, Vibrio parahaemolyticus; identical to SEQ ID NO: 1878
  Vibrio parahaemolyticus F3_4

SEQ ID NO: 2903 - DNA, 28 bp, Vibrio parahaemolyticus
  Vibrio parahaemolyticus F2_7
gtgaactgccgaataggtagctgataat

SEQ ID NO: 2904 - DNA, 28 bp, Vibrio parahaemolyticus
  Vibrio parahaemolyticus F2_7
gtgaactgccgcataggtagagagaatc

SEQ ID NO: 2905 - DNA, 28 bp, Vibrio parahaemolyticus
  Vibrio parahaemolyticus F2_7
tcattactactaaaaagtagctgataac

SEQ ID NO: 2906 - DNA, 28 bp, Vibrio parahaemolyticus
  Vibrio parahaemolyticus F2_7
gaatactgccgaacaggtaggaggctca

SEQ ID NO: 2907 - DNA, 32 bp, Vibrio parahaemolyticus; identical to SEQ ID NO: 1946
  Vibrio parahaemolyticus F2_7

SEQ ID NO: 2908 - DNA, 31 bp, Vibrio parahaemolyticus; identical to SEQ ID NO: 1947
  Vibrio parahaemolyticus F2_7

SEQ ID NO: 2909 - DNA, 31 bp, Vibrio parahaemolyticus; identical to SEQ ID NO: 1877
  Vibrio parahaemolyticus F2_7

SEQ ID NO: 2910 - DNA, 31 bp, Vibrio parahaemolyticus; identical to SEQ ID NO: 1878
  Vibrio parahaemolyticus F2_7

SEQ ID NO: 2911 - DNA, 28 bp, Vibrio parahaemolyticus
  Vibrio parahaemolyticus C2_1
gtgtactgccgaataggtagctgataat

SEQ ID NO: 2912 - DNA, 28 bp, Vibrio parahaemolyticus
  Vibrio parahaemolyticus C2_1
gtgaactgccgcataggtagagaggagc

SEQ ID NO: 2913 - DNA, 28 bp, Vibrio parahaemolyticus
  Vibrio parahaemolyticus C2_1
tcattactactgcaaagtagctgatcac

SEQ ID NO: 2914 - DNA, 28 bp, Vibrio parahaemolyticus
  Vibrio parahaemolyticus C2_1
gaatactgccgaacaggtaggaggctca

SEQ ID NO: 2915 - DNA, 32 bp, Vibrio parahaemolyticus; identical to SEQ ID NO: 2814
  Vibrio parahaemolyticus C2_1

SEQ ID NO: 2916 - DNA, 31 bp, Vibrio parahaemolyticus; identical to SEQ ID NO: 1877
  Vibrio parahaemolyticus C2_1

SEQ ID NO: 2917 - DNA, 31 bp, Vibrio parahaemolyticus; identical to SEQ ID NO: 1970
  Vibrio parahaemolyticus C2_1

SEQ ID NO: 2918 - DNA, 28 bp, Vibrio parahaemolyticus
  Vibrio parahaemolyticus VP080007
gtgaactgccgaataggtagctgataat

SEQ ID NO: 2919 - DNA, 28 bp, Vibrio parahaemolyticus
  Vibrio parahaemolyticus VP080007
gtgaactgccgcataggtagagagaatc

SEQ ID NO: 2920 - DNA, 28 bp, Vibrio parahaemolyticus
  Vibrio parahaemolyticus VP080007
tcattactactaaaaagtagctgataac

SEQ ID NO: 2921 - DNA, 28 bp, Vibrio parahaemolyticus
  Vibrio parahaemolyticus VP080007
gaatactgccgaacaggtaggaggctca

SEQ ID NO: 2922 - DNA, 32 bp, Vibrio parahaemolyticus; identical to SEQ ID NO: 2035
  Vibrio parahaemolyticus VP080007

SEQ ID NO: 2923 - DNA, 31 bp, Vibrio parahaemolyticus; identical to SEQ ID NO: 1947
  Vibrio parahaemolyticus VP080007

SEQ ID NO: 2924 - DNA, 31 bp, Vibrio parahaemolyticus; identical to SEQ ID NO: 1877
  Vibrio parahaemolyticus VP080007

SEQ ID NO: 2925 - DNA, 31 bp, Vibrio parahaemolyticus; identical to SEQ ID NO: 1878
  Vibrio parahaemolyticus VP080007

SEQ ID NO: 2926 - DNA, 28 bp, Vibrio parahaemolyticus
  Vibrio parahaemolyticus VP140095
gtgaactgccgaataggtagctgataat

SEQ ID NO: 2927 - DNA, 28 bp, Vibrio parahaemolyticus
  Vibrio parahaemolyticus VP140095
gtgaactgccgcataggtagagagaatc

SEQ ID NO: 2928 - DNA, 28 bp, Vibrio parahaemolyticus
  Vibrio parahaemolyticus VP140095
tcattactactaaaaagtagctgataac

SEQ ID NO: 2929 - DNA, 28 bp, Vibrio parahaemolyticus
  Vibrio parahaemolyticus VP140095
gaatactgccgaacaggtaggaggctca

SEQ ID NO: 2930 - DNA, 32 bp, Vibrio parahaemolyticus; identical to SEQ ID NO: 2035
  Vibrio parahaemolyticus VP140095

SEQ ID NO: 2931 - DNA, 31 bp, Vibrio parahaemolyticus; identical to SEQ ID NO: 1947
  Vibrio parahaemolyticus VP140095

SEQ ID NO: 2932 - DNA, 31 bp, Vibrio parahaemolyticus; identical to SEQ ID NO: 1877
  Vibrio parahaemolyticus VP140095

SEQ ID NO: 2933 - DNA, 31 bp, Vibrio parahaemolyticus; identical to SEQ ID NO: 1878
  Vibrio parahaemolyticus VP140095

SEQ ID NO: 2934 - DNA, 28 bp, Vibrio parahaemolyticus
  Vibrio parahaemolyticus VP160744
gtgaactgccgaataggtagctgataat

SEQ ID NO: 2935 - DNA, 28 bp, Vibrio parahaemolyticus
  Vibrio parahaemolyticus VP160744
gtgaactgccgcataggtagagagaatc

SEQ ID NO: 2936 - DNA, 28 bp, Vibrio parahaemolyticus
  Vibrio parahaemolyticus VP160744
tcattactactaaaaagtagctgataac

SEQ ID NO: 2937 - DNA, 28 bp, Vibrio parahaemolyticus
  Vibrio parahaemolyticus VP160744
gaatactgccgaacaggtaggaggctca

SEQ ID NO: 2938 - DNA, 32 bp, Vibrio parahaemolyticus; identical to SEQ ID NO: 1946
  Vibrio parahaemolyticus VP160744

SEQ ID NO: 2939 - DNA, 31 bp, Vibrio parahaemolyticus; identical to SEQ ID NO: 1947
  Vibrio parahaemolyticus VP160744

SEQ ID NO: 2940 - DNA, 31 bp, Vibrio parahaemolyticus; identical to SEQ ID NO: 1877
  Vibrio parahaemolyticus VP160744

SEQ ID NO: 2941 - DNA, 31 bp, Vibrio parahaemolyticus; identical to SEQ ID NO: 1878
  Vibrio parahaemolyticus VP160744

SEQ ID NO: 2942 - DNA, 28 bp, Vibrio parahaemolyticus
  Vibrio parahaemolyticus VP161602
gtgaactgccgaataggtagctgataat

SEQ ID NO: 2943 - DNA, 28 bp, Vibrio parahaemolyticus
  Vibrio parahaemolyticus VP161602
gtgaactgccgcataggtagagagaatc

SEQ ID NO: 2944 - DNA, 28 bp, Vibrio parahaemolyticus
  Vibrio parahaemolyticus VP161602
tcattactactaaaaagtagctgataac

SEQ ID NO: 2945 - DNA, 28 bp, Vibrio parahaemolyticus
  Vibrio parahaemolyticus VP161602
gaatactgccgaacaggtaggaggctca

SEQ ID NO: 2946 - DNA, 32 bp, Vibrio parahaemolyticus; identical to SEQ ID NO: 2035
  Vibrio parahaemolyticus VP161602

SEQ ID NO: 2947 - DNA, 31 bp, Vibrio parahaemolyticus; identical to SEQ ID NO: 1947
  Vibrio parahaemolyticus VP161602

SEQ ID NO: 2948 - DNA, 31 bp, Vibrio parahaemolyticus; identical to SEQ ID NO: 1877
  Vibrio parahaemolyticus VP161602

SEQ ID NO: 2949 - DNA, 31 bp, Vibrio parahaemolyticus; identical to SEQ ID NO: 1878
  Vibrio parahaemolyticus VP161602

SEQ ID NO: 2950 - DNA, 28 bp, Vibrio parahaemolyticus
  Vibrio parahaemolyticus HZ16-338
gtgaactgccgaataggtagctgataat

SEQ ID NO: 2951 - DNA, 28 bp, Vibrio parahaemolyticus
  Vibrio parahaemolyticus HZ16-338
gtgaactgccgcataggtagagagaatc

SEQ ID NO: 2952 - DNA, 28 bp, Vibrio parahaemolyticus
  Vibrio parahaemolyticus HZ16-338
tcattactactaaaaagtagctgataac

SEQ ID NO: 2953 - DNA, 28 bp, Vibrio parahaemolyticus
  Vibrio parahaemolyticus HZ16-338
gaatactgccgaacaggtaggaggctca

SEQ ID NO: 2954 - DNA, 32 bp, Vibrio parahaemolyticus; identical to SEQ ID NO: 2035
  Vibrio parahaemolyticus HZ16-338

SEQ ID NO: 2955 - DNA, 31 bp, Vibrio parahaemolyticus; identical to SEQ ID NO: 1947
  Vibrio parahaemolyticus HZ16-338

SEQ ID NO: 2956 - DNA, 31 bp, Vibrio parahaemolyticus; identical to SEQ ID NO: 1877
  Vibrio parahaemolyticus HZ16-338

SEQ ID NO: 2957 - DNA, 31 bp, Vibrio parahaemolyticus; identical to SEQ ID NO: 1878
  Vibrio parahaemolyticus HZ16-338

SEQ ID NO: 2958 - DNA, 28 bp, Vibrio parahaemolyticus
  Vibrio parahaemolyticus EKP-021
gtgaactgccgaataggtagctgataat

SEQ ID NO: 2959 - DNA, 28 bp, Vibrio parahaemolyticus
  Vibrio parahaemolyticus EKP-021
gtgaactgccgcataggtagagagaatc

SEQ ID NO: 2960 - DNA, 28 bp, Vibrio parahaemolyticus
  Vibrio parahaemolyticus EKP-021
tcattactactaaaaagtagctgataac

SEQ ID NO: 2961 - DNA, 28 bp, Vibrio parahaemolyticus
  Vibrio parahaemolyticus EKP-021
gaatactgccgaacaggtaggaggctca

SEQ ID NO: 2962 - DNA, 32 bp, Vibrio parahaemolyticus; identical to SEQ ID NO: 1946
  Vibrio parahaemolyticus EKP-021

SEQ ID NO: 2963 - DNA, 31 bp, Vibrio parahaemolyticus; identical to SEQ ID NO: 1947
  Vibrio parahaemolyticus EKP-021

SEQ ID NO: 2964 - DNA, 31 bp, Vibrio parahaemolyticus; identical to SEQ ID NO: 1877
  Vibrio parahaemolyticus EKP-021

SEQ ID NO: 2965 - DNA, 31 bp, Vibrio parahaemolyticus; identical to SEQ ID NO: 1878
  Vibrio parahaemolyticus EKP-021

SEQ ID NO: 2966 - DNA, 28 bp, Vibrio parahaemolyticus
  Vibrio parahaemolyticus VP161904
gtgaactgccgaataggtagctgataat

SEQ ID NO: 2967 - DNA, 28 bp, Vibrio parahaemolyticus
  Vibrio parahaemolyticus VP161904
gtgaactgccgcataggtagagaggatc

SEQ ID NO: 2968 - DNA, 28 bp, Vibrio parahaemolyticus
  Vibrio parahaemolyticus VP161904
tcattactacttaaaagtagctgataac

SEQ ID NO: 2969 - DNA, 28 bp, Vibrio parahaemolyticus
  Vibrio parahaemolyticus VP161904
gaatactgccgaacaggtaggaggctca

SEQ ID NO: 2970 - DNA, 31 bp, Vibrio parahaemolyticus; identical to SEQ ID NO: 2018
  Vibrio parahaemolyticus VP161904

SEQ ID NO: 2971 - DNA, 31 bp, Vibrio parahaemolyticus; identical to SEQ ID NO: 1947
  Vibrio parahaemolyticus VP161904

SEQ ID NO: 2972 - DNA, 31 bp, Vibrio parahaemolyticus; identical to SEQ ID NO: 1877
  Vibrio parahaemolyticus VP161904

SEQ ID NO: 2973 - DNA, 31 bp, Vibrio parahaemolyticus; identical to SEQ ID NO: 1878
  Vibrio parahaemolyticus VP161904

SEQ ID NO: 2974 - DNA, 28 bp, Vibrio campbellii
  Vibrio campbellii ABR2-13
gtgaactgccgagtaggtagctgataat

SEQ ID NO: 2975 - DNA, 28 bp, Vibrio campbellii
  Vibrio campbellii ABR2-13
gtgaactgccgagtaggtagagtacatt

SEQ ID NO: 2976 - DNA, 28 bp, Vibrio campbellii
  Vibrio campbellii ABR2-13
tcaaaactactgtaaagtagctgataat

SEQ ID NO: 2977 - DNA, 28 bp, Vibrio campbellii
  Vibrio campbellii ABR2-13
aattactgctgaataagtagctaactaa

SEQ ID NO: 2978 - DNA, 32 bp, Vibrio campbellii
  Vibrio campbellii ABR2-13
ttcctccaaacagtcatccaacgtcgatctag

SEQ ID NO: 2979 - DNA, 32 bp, Vibrio campbellii
  Vibrio campbellii ABR2-13
agtgatcttgattgggtcgagccattacgttt

SEQ ID NO: 2980 - DNA, 32 bp, Vibrio campbellii
  Vibrio campbellii ABR2-13
aaacgaaccaccttcattcgagttcaagagca

SEQ ID NO: 2981 - DNA, 32 bp, Vibrio campbellii
  Vibrio campbellii ABR2-13
aagcgtactacgttcatccgcgtacaagagca

SEQ ID NO: 2982 - DNA, 28 bp, Vibrio rotiferianus
  Vibrio rotiferianus CAIM 577
gtgtactaccgcataggtagctgataat

SEQ ID NO: 2983 - DNA, 28 bp, Vibrio rotiferianus
  Vibrio rotiferianus CAIM 577
acacactgccgaataggtagatatcttt

SEQ ID NO: 2984 - DNA, 28 bp, Vibrio rotiferianus
  Vibrio rotiferianus CAIM 577
tcactactactgcaaagtagctgataat

SEQ ID NO: 2985 - DNA, 28 bp, Vibrio rotiferianus
  Vibrio rotiferianus CAIM 577
gaatactgccgaataggtagactatcaa

SEQ ID NO: 2986 - DNA, 31 bp, Vibrio rotiferianus
  Vibrio rotiferianus CAIM 577
gatacacaatgttcaattccatcaaatggtt

SEQ ID NO: 2987 - DNA, 30 bp, Vibrio rotiferianus
  Vibrio rotiferianus CAIM 577
aaatttacatctcccgctctgccaaaaaac

SEQ ID NO: 2988 - DNA, 30 bp, Vibrio rotiferianus
  Vibrio rotiferianus CAIM 577
aagttaacgtctcccggctcagcaagaaaa

SEQ ID NO: 2989 - DNA, 28 bp, Vibrio cyclitrophicus
  Vibrio cyclitrophicus 10N.286.55.F1
gtgtactgccgaataggtagctgataag

SEQ ID NO: 2990 - DNA, 28 bp, Vibrio cyclitrophicus
  Vibrio cyclitrophicus 10N.286.55.F1
gtgtactgccgaataggtagccatccaa

SEQ ID NO: 2991 - DNA, 28 bp, Vibrio cyclitrophicus
  Vibrio cyclitrophicus 10N.286.55.F1
ctttactactgaaatagtagctgataat

SEQ ID NO: 2992 - DNA, 28 bp, Vibrio cyclitrophicus
  Vibrio cyclitrophicus 10N.286.55.F1
atatactgctgaataagtagatttttag

SEQ ID NO: 2993 - DNA, 32 bp, Vibrio cyclitrophicus
  Vibrio cyclitrophicus 10N.286.55.F1
aacaagtatgcctggcatgggcaagtagccta

SEQ ID NO: 2994 - DNA, 32 bp, Vibrio cyclitrophicus
  Vibrio cyclitrophicus 10N.286.55.F1
aaacgaaccacatttattcgagttcaagatca

SEQ ID NO: 2995 - DNA, 32 bp, Vibrio cyclitrophicus; identical to SEQ ID NO: 2756
  Vibrio cyclitrophicus 10N.286.55.F1

SEQ ID NO: 2996 - DNA, 28 bp, Photobacterium leiognathi
  Photobacterium leiognathi PL-721
ggtaactaccgagtaggtagctgacaaa

SEQ ID NO: 2997 - DNA, 28 bp, Photobacterium leiognathi
  Photobacterium leiognathi PL-721
gatcactgccgaataggtagatatttaa

SEQ ID NO: 2998 - DNA, 28 bp, Photobacterium leiognathi
  Photobacterium leiognathi PL-721
gttaactgccgagtaggtagctgataag

SEQ ID NO: 2999 - DNA, 28 bp, Photobacterium leiognathi
  Photobacterium leiognathi PL-721
ggttactgccgagtaggtagttaataaa

SEQ ID NO: 3000 - DNA, 31 bp, Photobacterium leiognathi
  Photobacterium leiognathi PL-721
caaataaacaatatttttcgacctccaaacg

SEQ ID NO: 3001 - DNA, 32 bp, Photobacterium leiognathi
  Photobacterium leiognathi PL-721
atgaaacaatgaacaaactcgcaatggcttgc

SEQ ID NO: 3002 - DNA, 32 bp, Photobacterium leiognathi
  Photobacterium leiognathi PL-721
agagctaatttaagcatggatggtgcatcaaa

SEQ ID NO: 3003 - DNA, 32 bp, Photobacterium leiognathi
  Photobacterium leiognathi PL-721
tgagttaatttcagcatggatgggacatcagg

SEQ ID NO: 3004 - DNA, 28 bp, Vibrio parahaemolyticus
  Vibrio parahaemolyticus S176
gtgaactgccgaataggtagctgataat

SEQ ID NO: 3005 - DNA, 28 bp, Vibrio parahaemolyticus
  Vibrio parahaemolyticus S176
gtgaactgccgcataggtagagagaatc

SEQ ID NO: 3006 - DNA, 28 bp, Vibrio parahaemolyticus
  Vibrio parahaemolyticus S176
tcattactactaaaaagtagctgataac

SEQ ID NO: 3007 - DNA, 28 bp, Vibrio parahaemolyticus
  Vibrio parahaemolyticus S176
gaatactgccgaacaggtaggaggctca

SEQ ID NO: 3008 - DNA, 31 bp, Vibrio parahaemolyticus; identical to SEQ ID NO: 1947
  Vibrio parahaemolyticus S176

SEQ ID NO: 3009 - DNA, 31 bp, Vibrio parahaemolyticus; identical to SEQ ID NO: 1877
  Vibrio parahaemolyticus S176

SEQ ID NO: 3010 - DNA, 31 bp, Vibrio parahaemolyticus; identical to SEQ ID NO: 1878
  Vibrio parahaemolyticus S176

SEQ ID NO: 3011 - DNA, 28 bp, Vibrio cholerae
  Vibrio cholerae FORC_076
gtgaactgccgagtaggtagctgataat

SEQ ID NO: 3012 - DNA, 28 bp, Vibrio cholerae
  Vibrio cholerae FORC_076
gtgaactgccgagtaggtagctgacaat

SEQ ID NO: 3013 - DNA, 28 bp, Vibrio cholerae
  Vibrio cholerae FORC_076
gcgaactgctgagtaggcagagcgcatc

SEQ ID NO: 3014 - DNA, 28 bp, Vibrio cholerae
  Vibrio cholerae FORC_076
tcattactactgcaaagtagctgataac

SEQ ID NO: 3015 - DNA, 28 bp, Vibrio cholerae
  Vibrio cholerae FORC_076
ctttactgctgaataagtagataactac

SEQ ID NO: 3016 - DNA, 32 bp, Vibrio cholerae
  Vibrio cholerae FORC_076
aaaggctgaattggtcgaacgagaatgtgatc

SEQ ID NO: 3017 - DNA, 32 bp, Vibrio cholerae
  Vibrio cholerae FORC_076
gttagtagaaatggaaattgtaacgtttcagc

SEQ ID NO: 3018 - DNA, 32 bp, Vibrio cholerae
  Vibrio cholerae FORC_076
tccttatagatgtagttgttgtctccatagct

SEQ ID NO: 3019 - DNA, 32 bp, Vibrio cholerae
  Vibrio cholerae FORC_076
aaacgaaccaccttcattcgagtacaagagca

SEQ ID NO: 3020 - DNA, 32 bp, Vibrio cholerae
  Vibrio cholerae FORC_076
aagcgtacaacatttatccgagttcaagagca

SEQ ID NO: 3021 - DNA, 28 bp, Vibrio parahaemolyticus
  Vibrio parahaemolyticus O3:K6 substr. RIMD 2210633
gtgaactgccgaataggtagctgataat

SEQ ID NO: 3022 - DNA, 28 bp, Vibrio parahaemolyticus
  Vibrio parahaemolyticus O3:K6 substr. RIMD 2210633
gtgaactgccgcataggtagagagaatc

SEQ ID NO: 3023 - DNA, 28 bp, Vibrio parahaemolyticus
  Vibrio parahaemolyticus O3:K6 substr. RIMD 2210633
tcattactactaaaaagtagctgataac

SEQ ID NO: 3024 - DNA, 28 bp, Vibrio parahaemolyticus
  Vibrio parahaemolyticus O3:K6 substr. RIMD 2210633
gaatactgccgaacaggtaggaggctca

SEQ ID NO: 3025 - DNA, 32 bp, Vibrio parahaemolyticus; identical to SEQ ID NO: 1946
  Vibrio parahaemolyticus O3:K6 substr. RIMD 2210633

SEQ ID NO: 3026 - DNA, 31 bp, Vibrio parahaemolyticus; identical to SEQ ID NO: 1947
  Vibrio parahaemolyticus O3:K6 substr. RIMD 2210633

SEQ ID NO: 3027 - DNA, 31 bp, Vibrio parahaemolyticus; identical to SEQ ID NO: 1877
  Vibrio parahaemolyticus O3:K6 substr. RIMD 2210633

SEQ ID NO: 3028 - DNA, 31 bp, Vibrio parahaemolyticus; identical to SEQ ID NO: 1878
  Vibrio parahaemolyticus O3:K6 substr. RIMD 2210633

SEQ ID NO: 3029 - DNA, 28 bp, Vibrio parahaemolyticus
  Vibrio parahaemolyticus CFSAN001617
gtgaactgccgaataggtagctgataat

SEQ ID NO: 3030 - DNA, 28 bp, Vibrio parahaemolyticus
  Vibrio parahaemolyticus CFSAN001617
gtgaactgccgcataggtagagaggatc

SEQ ID NO: 3031 - DNA, 28 bp, Vibrio parahaemolyticus
  Vibrio parahaemolyticus CFSAN001617
tcatcactactgaaaagtagctgataac

SEQ ID NO: 3032 - DNA, 28 bp, Vibrio parahaemolyticus
  Vibrio parahaemolyticus CFSAN001617
gaatactgccgaacaggtaggaggctca

SEQ ID NO: 3033 - DNA, 31 bp, Vibrio parahaemolyticus; identical to SEQ ID NO: 1876
  Vibrio parahaemolyticus CFSAN001617

SEQ ID NO: 3034 - DNA, 31 bp, Vibrio parahaemolyticus; identical to SEQ ID NO: 1877
  Vibrio parahaemolyticus CFSAN001617

SEQ ID NO: 3035 - DNA, 31 bp, Vibrio parahaemolyticus; identical to SEQ ID NO: 1970
  Vibrio parahaemolyticus CFSAN001617

SEQ ID NO: 3036 - DNA, 28 bp, Vibrio parahaemolyticus
  Vibrio parahaemolyticus CFSAN007456
gtgaactgccgaataggtagctgataat

SEQ ID NO: 3037 - DNA, 28 bp, Vibrio parahaemolyticus
  Vibrio parahaemolyticus CFSAN007456
gtgaactgccgcataggtagagaggagc

SEQ ID NO: 3038 - DNA, 28 bp, Vibrio parahaemolyticus
  Vibrio parahaemolyticus CFSAN007456
tcattgctactgaaaagtagctgatcac

SEQ ID NO: 3039 - DNA, 28 bp, Vibrio parahaemolyticus
  Vibrio parahaemolyticus CFSAN007456
gaatactgccgaacaggtaggaggctca

SEQ ID NO: 3040 - DNA, 32 bp, Vibrio parahaemolyticus; identical to SEQ ID NO: 2814
  Vibrio parahaemolyticus CFSAN007456

SEQ ID NO: 3041 - DNA, 31 bp, Vibrio parahaemolyticus; identical to SEQ ID NO: 1877
  Vibrio parahaemolyticus CFSAN007456

SEQ ID NO: 3042 - DNA, 31 bp, Vibrio parahaemolyticus; identical to SEQ ID NO: 1970
  Vibrio parahaemolyticus CFSAN007456

SEQ ID NO: 3043 - DNA, 28 bp, Vibrio parahaemolyticus
  Vibrio parahaemolyticus CFSAN007429
gtgaactgccgaataggtagctgataat

SEQ ID NO: 3044 - DNA, 28 bp, Vibrio parahaemolyticus
  Vibrio parahaemolyticus CFSAN007429
gtgaactgccgcataggtagagaggatc

SEQ ID NO: 3045 - DNA, 28 bp, Vibrio parahaemolyticus
  Vibrio parahaemolyticus CFSAN007429
tcatcactactgaaaagtagctgataac

SEQ ID NO: 3046 - DNA, 28 bp, Vibrio parahaemolyticus
  Vibrio parahaemolyticus CFSAN007429
gaatactgccgaacaggtaggaggctca

SEQ ID NO: 3047 - DNA, 31 bp, Vibrio parahaemolyticus; identical to SEQ ID NO: 1876
  Vibrio parahaemolyticus CFSAN007429

SEQ ID NO: 3048 - DNA, 31 bp, Vibrio parahaemolyticus; identical to SEQ ID NO: 1877
  Vibrio parahaemolyticus CFSAN007429

SEQ ID NO: 3049 - DNA, 31 bp, Vibrio parahaemolyticus; identical to SEQ ID NO: 1878
  Vibrio parahaemolyticus CFSAN007429

SEQ ID NO: 3050 - DNA, 28 bp, Vibrio parahaemolyticus
  Vibrio parahaemolyticus CFSAN007433
gtgaactgccgaataggtagctgataat

SEQ ID NO: 3051 - DNA, 28 bp, Vibrio parahaemolyticus
  Vibrio parahaemolyticus CFSAN007433
gtgaactgccgcataggtagagaggatc

SEQ ID NO: 3052 - DNA, 28 bp, Vibrio parahaemolyticus
  Vibrio parahaemolyticus CFSAN007433
tcatcactactgaaaagtagctgataac

SEQ ID NO: 3053 - DNA, 28 bp, Vibrio parahaemolyticus
  Vibrio parahaemolyticus CFSAN007433
gaatactgccgaacaggtaggaggctca

SEQ ID NO: 3054 - DNA, 31 bp, Vibrio parahaemolyticus; identical to SEQ ID NO: 1876
  Vibrio parahaemolyticus CFSAN007433

SEQ ID NO: 3055 - DNA, 31 bp, Vibrio parahaemolyticus; identical to SEQ ID NO: 1877
  Vibrio parahaemolyticus CFSAN007433

SEQ ID NO: 3056 - DNA, 31 bp, Vibrio parahaemolyticus; identical to SEQ ID NO: 1878
  Vibrio parahaemolyticus CFSAN007433

SEQ ID NO: 3057 - DNA, 28 bp, Vibrio parahaemolyticus
  Vibrio parahaemolyticus CFSAN001620
gtgaactgccgaataggtagctgataat

SEQ ID NO: 3058 - DNA, 28 bp, Vibrio parahaemolyticus
  Vibrio parahaemolyticus CFSAN001620
gtgaactgccgcataggtagagaggatc

SEQ ID NO: 3059 - DNA, 28 bp, Vibrio parahaemolyticus
  Vibrio parahaemolyticus CFSAN001620
tcatcactactgaaaagtagctgataac

SEQ ID NO: 3060 - DNA, 28 bp, Vibrio parahaemolyticus
  Vibrio parahaemolyticus CFSAN001620
gaatactgccgaacaggtaggaggctca

SEQ ID NO: 3061 - DNA, 31 bp, Vibrio parahaemolyticus; identical to SEQ ID NO: 1876
  Vibrio parahaemolyticus CFSAN001620

SEQ ID NO: 3062 - DNA, 31 bp, Vibrio parahaemolyticus; identical to SEQ ID NO: 1877
  Vibrio parahaemolyticus CFSAN001620

SEQ ID NO: 3063 - DNA, 31 bp, Vibrio parahaemolyticus; identical to SEQ ID NO: 1878
  Vibrio parahaemolyticus CFSAN001620

SEQ ID NO: 3064 - DNA, 28 bp, Vibrio parahaemolyticus
  Vibrio parahaemolyticus CFSAN006132
gtgaactgccgaataggtagctgataat

SEQ ID NO: 3065 - DNA, 28 bp, Vibrio parahaemolyticus
  Vibrio parahaemolyticus CFSAN006132
gtgaactgccgcataggtagagaggatc

SEQ ID NO: 3066 - DNA, 28 bp, Vibrio parahaemolyticus
  Vibrio parahaemolyticus CFSAN006132
tcatcactactgaaaagtagctgataac

SEQ ID NO: 3067 - DNA, 28 bp, Vibrio parahaemolyticus
  Vibrio parahaemolyticus CFSAN006132
gaatactgccgaacaggtaggaggctca

SEQ ID NO: 3068 - DNA, 31 bp, Vibrio parahaemolyticus; identical to SEQ ID NO: 1876
  Vibrio parahaemolyticus CFSAN006132

SEQ ID NO: 3069 - DNA, 31 bp, Vibrio parahaemolyticus; identical to SEQ ID NO: 1877
  Vibrio parahaemolyticus CFSAN006132

SEQ ID NO: 3070 - DNA, 31 bp, Vibrio parahaemolyticus; identical to SEQ ID NO: 1878
  Vibrio parahaemolyticus CFSAN006132

SEQ ID NO: 3071 - DNA, 28 bp, Vibrio parahaemolyticus
  Vibrio parahaemolyticus 863
gtgaactgccgaataggtagctgataat

SEQ ID NO: 3072 - DNA, 28 bp, Vibrio parahaemolyticus
  Vibrio parahaemolyticus 863
gtgaactgccgcataggtagagagaatc

SEQ ID NO: 3073 - DNA, 28 bp, Vibrio parahaemolyticus
  Vibrio parahaemolyticus 863
tcattactactaaaaagtagctgataac

SEQ ID NO: 3074 - DNA, 28 bp, Vibrio parahaemolyticus
  Vibrio parahaemolyticus 863
gaatactgccgaacaggtaggaggctca

SEQ ID NO: 3075 - DNA, 32 bp, Vibrio parahaemolyticus; identical to SEQ ID NO: 1946
  Vibrio parahaemolyticus 863

SEQ ID NO: 3076 - DNA, 31 bp, Vibrio parahaemolyticus; identical to SEQ ID NO: 1947
  Vibrio parahaemolyticus 863

SEQ ID NO: 3077 - DNA, 31 bp, Vibrio parahaemolyticus; identical to SEQ ID NO: 1877
  Vibrio parahaemolyticus 863

SEQ ID NO: 3078 - DNA, 31 bp, Vibrio parahaemolyticus; identical to SEQ ID NO: 1878
  Vibrio parahaemolyticus 863

SEQ ID NO: 3079 - DNA, 28 bp, Vibrio parahaemolyticus
  Vibrio parahaemolyticus EN9701121
gtgaactgccgaataggtagctgataat

SEQ ID NO: 3080 - DNA, 28 bp, Vibrio parahaemolyticus
  Vibrio parahaemolyticus EN9701121
gtgaactgccgcataggtagagaggatc

SEQ ID NO: 3081 - DNA, 28 bp, Vibrio parahaemolyticus
  Vibrio parahaemolyticus EN9701121
tcatcactactgaaaagtagctgataac

SEQ ID NO: 3082 - DNA, 28 bp, Vibrio parahaemolyticus
  Vibrio parahaemolyticus EN9701121
gaatactgccgaacaggtaggaggctca

SEQ ID NO: 3083 - DNA, 31 bp, Vibrio parahaemolyticus; identical to SEQ ID NO: 1876
  Vibrio parahaemolyticus EN9701121

SEQ ID NO: 3084 - DNA, 31 bp, Vibrio parahaemolyticus; identical to SEQ ID NO: 1877
  Vibrio parahaemolyticus EN9701121

SEQ ID NO: 3085 - DNA, 31 bp, Vibrio parahaemolyticus; identical to SEQ ID NO: 1970
  Vibrio parahaemolyticus EN9701121

SEQ ID NO: 3086 - DNA, 28 bp, Vibrio parahaemolyticus
  Vibrio parahaemolyticus 857499
gtgaactgccgaataggtagctgataat

SEQ ID NO: 3087 - DNA, 28 bp, Vibrio parahaemolyticus
  Vibrio parahaemolyticus 857499
gtgaactgccgcataggtagagaggatc

SEQ ID NO: 3088 - DNA, 28 bp, Vibrio parahaemolyticus
  Vibrio parahaemolyticus 857499
tcatcactactgaaaagtagctgataac

SEQ ID NO: 3089 - DNA, 28 bp, Vibrio parahaemolyticus
  Vibrio parahaemolyticus 857499
gaatactgccgaacaggtaggaggctca

SEQ ID NO: 3090 - DNA, 31 bp, Vibrio parahaemolyticus; identical to SEQ ID NO: 1876
  Vibrio parahaemolyticus 857499

SEQ ID NO: 3091 - DNA, 31 bp, Vibrio parahaemolyticus; identical to SEQ ID NO: 1877
  Vibrio parahaemolyticus 857499

SEQ ID NO: 3092 - DNA, 31 bp, Vibrio parahaemolyticus; identical to SEQ ID NO: 1878
  Vibrio parahaemolyticus 857499

SEQ ID NO: 3093 - DNA, 28 bp, Vibrio parahaemolyticus
  Vibrio parahaemolyticus 855308
gtgaactgccgaataggtagctgataat

SEQ ID NO: 3094 - DNA, 28 bp, Vibrio parahaemolyticus
  Vibrio parahaemolyticus 855308
gtgaactgccgcataggtagagaggatc

SEQ ID NO: 3095 - DNA, 28 bp, Vibrio parahaemolyticus
  Vibrio parahaemolyticus 855308
tcatcactactgaaaagtagctgataac

SEQ ID NO: 3096 - DNA, 28 bp, Vibrio parahaemolyticus
  Vibrio parahaemolyticus 855308
gaatactgccgaacaggtaggaggctca

SEQ ID NO: 3097 - DNA, 31 bp, Vibrio parahaemolyticus; identical to SEQ ID NO: 1876
  Vibrio parahaemolyticus 855308

SEQ ID NO: 3098 - DNA, 31 bp, Vibrio parahaemolyticus; identical to SEQ ID NO: 1877
  Vibrio parahaemolyticus 855308

SEQ ID NO: 3099 - DNA, 31 bp, Vibrio parahaemolyticus; identical to SEQ ID NO: 1878
  Vibrio parahaemolyticus 855308

SEQ ID NO: 3100 - DNA, 28 bp, Vibrio parahaemolyticus
  Vibrio parahaemolyticus 04-1290
gtgaactgccgaataggtagctgataat

SEQ ID NO: 3101 - DNA, 28 bp, Vibrio parahaemolyticus
  Vibrio parahaemolyticus 04-1290
gtgaactgccgcataggtagagaggatc

SEQ ID NO: 3102 - DNA, 28 bp, Vibrio parahaemolyticus
  Vibrio parahaemolyticus 04-1290
tcatcactactgaaaagtagctgataac

SEQ ID NO: 3103 - DNA, 28 bp, Vibrio parahaemolyticus
  Vibrio parahaemolyticus 04-1290
gaatactgccgaacaggtaggaggctca

SEQ ID NO: 3104 - DNA, 31 bp, Vibrio parahaemolyticus; identical to SEQ ID NO: 1876
  Vibrio parahaemolyticus 04-1290

SEQ ID NO: 3105 - DNA, 31 bp, Vibrio parahaemolyticus; identical to SEQ ID NO: 1877
  Vibrio parahaemolyticus 04-1290

SEQ ID NO: 3106 - DNA, 31 bp, Vibrio parahaemolyticus; identical to SEQ ID NO: 1878
  Vibrio parahaemolyticus 04-1290

SEQ ID NO: 3107 - DNA, 28 bp, Vibrio parahaemolyticus
  Vibrio parahaemolyticus 07-1339
gtgaactgccgaataggtagctgataat

SEQ ID NO: 3108 - DNA, 28 bp, Vibrio parahaemolyticus
  Vibrio parahaemolyticus 07-1339
gtgaactgccgcataggtagagagaatc

SEQ ID NO: 3109 - DNA, 28 bp, Vibrio parahaemolyticus
  Vibrio parahaemolyticus 07-1339
tcattactactaaaaagtagctgataac

SEQ ID NO: 3110 - DNA, 28 bp, Vibrio parahaemolyticus
  Vibrio parahaemolyticus 07-1339
gaatactgccgaacaggtaggaggctca

SEQ ID NO: 3111 - DNA, 32 bp, Vibrio parahaemolyticus; identical to SEQ ID NO: 1946
  Vibrio parahaemolyticus 07-1339

SEQ ID NO: 3112 - DNA, 31 bp, Vibrio parahaemolyticus; identical to SEQ ID NO: 1947
  Vibrio parahaemolyticus 07-1339

SEQ ID NO: 3113 - DNA, 31 bp, Vibrio parahaemolyticus; identical to SEQ ID NO: 1877
  Vibrio parahaemolyticus 07-1339

SEQ ID NO: 3114 - DNA, 31 bp, Vibrio parahaemolyticus; identical to SEQ ID NO: 1878
  Vibrio parahaemolyticus 07-1339

SEQ ID NO: 3115 - DNA, 28 bp, Vibrio parahaemolyticus
  Vibrio parahaemolyticus FDAARGOS_52
gtgaactgccgaataggtagctgataat

SEQ ID NO: 3116 - DNA, 28 bp, Vibrio parahaemolyticus
  Vibrio parahaemolyticus FDAARGOS_52
atgaactgccgaataggtagagaggagc

SEQ ID NO: 3117 - DNA, 28 bp, Vibrio parahaemolyticus
  Vibrio parahaemolyticus FDAARGOS_52
tcattactacttaaaagtagctgataac

SEQ ID NO: 3118 - DNA, 28 bp, Vibrio parahaemolyticus
  Vibrio parahaemolyticus FDAARGOS_52
gaatactgccgaacaggtaggaggctca

SEQ ID NO: 3119 - DNA, 31 bp, Vibrio parahaemolyticus; identical to SEQ ID NO: 1897
  Vibrio parahaemolyticus FDAARGOS_52

SEQ ID NO: 3120 - DNA, 31 bp, Vibrio parahaemolyticus; identical to SEQ ID NO: 1877
  Vibrio parahaemolyticus FDAARGOS_52

SEQ ID NO: 3121 - DNA, 31 bp, Vibrio parahaemolyticus; identical to SEQ ID NO: 1878
  Vibrio parahaemolyticus FDAARGOS_52

SEQ ID NO: 3122 - DNA, 28 bp, Vibrio parahaemolyticus
  Vibrio parahaemolyticus S383-6
gtgaactgccgaataggtagctgataat

SEQ ID NO: 3123 - DNA, 28 bp, Vibrio parahaemolyticus
  Vibrio parahaemolyticus S383-6
atgaactgccgaataggtagagaggagc

SEQ ID NO: 3124 - DNA, 28 bp, Vibrio parahaemolyticus
  Vibrio parahaemolyticus S383-6
tcattactacttaaaagtagctgataac

SEQ ID NO: 3125 - DNA, 28 bp, Vibrio parahaemolyticus
  Vibrio parahaemolyticus S383-6
gaatactgccgaacaggtaggaggctca

SEQ ID NO: 3126 - DNA, 31 bp, Vibrio parahaemolyticus; identical to SEQ ID NO: 1897
  Vibrio parahaemolyticus S383-6

SEQ ID NO: 3127 - DNA, 31 bp, Vibrio parahaemolyticus; identical to SEQ ID NO: 1877
  Vibrio parahaemolyticus S383-6

SEQ ID NO: 3128 - DNA, 31 bp, Vibrio parahaemolyticus; identical to SEQ ID NO: 1878
  Vibrio parahaemolyticus S383-6

SEQ ID NO: 3129 - DNA, 28 bp, Vibrio parahaemolyticus
  Vibrio parahaemolyticus S440-7
gtgaactgccgaataggtagctgataat

SEQ ID NO: 3130 - DNA, 28 bp, Vibrio parahaemolyticus
  Vibrio parahaemolyticus S440-7
atgaactgccgaataggtagagaggagc

SEQ ID NO: 3131 - DNA, 28 bp, Vibrio parahaemolyticus
  Vibrio parahaemolyticus S440-7
tcattactacttaaaagtagctgataac

SEQ ID NO: 3132 - DNA, 28 bp, Vibrio parahaemolyticus
  Vibrio parahaemolyticus S440-7
gaatactgccgaacaggtaggaggctca

SEQ ID NO: 3133 - DNA, 31 bp, Vibrio parahaemolyticus; identical to SEQ ID NO: 1897
  Vibrio parahaemolyticus S440-7

SEQ ID NO: 3134 - DNA, 31 bp, Vibrio parahaemolyticus; identical to SEQ ID NO: 1877
  Vibrio parahaemolyticus S440-7

SEQ ID NO: 3135 - DNA, 31 bp, Vibrio parahaemolyticus; identical to SEQ ID NO: 1878
  Vibrio parahaemolyticus S440-7

SEQ ID NO: 3136 - DNA, 28 bp, Vibrio parahaemolyticus
  Vibrio parahaemolyticus ATC220
gtgaactgccgaataggtagctgataat

SEQ ID NO: 3137 - DNA, 28 bp, Vibrio parahaemolyticus
  Vibrio parahaemolyticus ATC220
gtgaactgccgcataggtagagagaatc

SEQ ID NO: 3138 - DNA, 28 bp, Vibrio parahaemolyticus
  Vibrio parahaemolyticus ATC220
tcattactactaaaaagtagctgataac

SEQ ID NO: 3139 - DNA, 28 bp, Vibrio parahaemolyticus
  Vibrio parahaemolyticus ATC220
gaatactgccgaacaggtaggaggctca

SEQ ID NO: 3140 - DNA, 32 bp, Vibrio parahaemolyticus; identical to SEQ ID NO: 1946
  Vibrio parahaemolyticus ATC220

SEQ ID NO: 3141 - DNA, 31 bp, Vibrio parahaemolyticus; identical to SEQ ID NO: 1947
  Vibrio parahaemolyticus ATC220

SEQ ID NO: 3142 - DNA, 31 bp, Vibrio parahaemolyticus; identical to SEQ ID NO: 1877
  Vibrio parahaemolyticus ATC220

SEQ ID NO: 3143 - DNA, 31 bp, Vibrio parahaemolyticus; identical to SEQ ID NO: 1878
  Vibrio parahaemolyticus ATC220

SEQ ID NO: 3144 - DNA, 28 bp, Vibrio parahaemolyticus
  Vibrio parahaemolyticus S372-5
gtgaactgccgaataggtagctgataat

SEQ ID NO: 3145 - DNA, 28 bp, Vibrio parahaemolyticus
  Vibrio parahaemolyticus S372-5
atgaactgccgaataggtagagaggagc

SEQ ID NO: 3146 - DNA, 28 bp, Vibrio parahaemolyticus
  Vibrio parahaemolyticus S372-5
tcattactacttaaaagtagctgataac

SEQ ID NO: 3147 - DNA, 28 bp, Vibrio parahaemolyticus
  Vibrio parahaemolyticus S372-5
gaatactgccgaacaggtaggaggctca

SEQ ID NO: 3148 - DNA, 31 bp, Vibrio parahaemolyticus; identical to SEQ ID NO: 1897
  Vibrio parahaemolyticus S372-5

SEQ ID NO: 3149 - DNA, 31 bp, Vibrio parahaemolyticus; identical to SEQ ID NO: 1877
  Vibrio parahaemolyticus S372-5

SEQ ID NO: 3150 - DNA, 31 bp, Vibrio parahaemolyticus; identical to SEQ ID NO: 1878
  Vibrio parahaemolyticus S372-5

SEQ ID NO: 3151 - DNA, 28 bp, Vibrio parahaemolyticus
  Vibrio parahaemolyticus A4EZ700
gtgaactgccgaataggtagctgataat

SEQ ID NO: 3152 - DNA, 28 bp, Vibrio parahaemolyticus
  Vibrio parahaemolyticus A4EZ700
gtgaactgccgcataggtagagaggatc

SEQ ID NO: 3153 - DNA, 28 bp, Vibrio parahaemolyticus
  Vibrio parahaemolyticus A4EZ700
tcatcactactgaaaagtagctgataac

SEQ ID NO: 3154 - DNA, 28 bp, Vibrio parahaemolyticus
  Vibrio parahaemolyticus A4EZ700
gaatactgccgaacaggtaggaggctca

SEQ ID NO: 3155 - DNA, 31 bp, Vibrio parahaemolyticus; identical to SEQ ID NO: 1876
  Vibrio parahaemolyticus A4EZ700

SEQ ID NO: 3156 - DNA, 31 bp, Vibrio parahaemolyticus; identical to SEQ ID NO: 1877
  Vibrio parahaemolyticus A4EZ700

SEQ ID NO: 3157 - DNA, 31 bp, Vibrio parahaemolyticus; identical to SEQ ID NO: 1970
  Vibrio parahaemolyticus A4EZ700

SEQ ID NO: 3158 - DNA, 28 bp, Vibrio parahaemolyticus
  Vibrio parahaemolyticus A1EZ919
gtgaactgccgaataggtagctgataat

SEQ ID NO: 3159 - DNA, 28 bp, Vibrio parahaemolyticus
  Vibrio parahaemolyticus A1EZ919
gtgaactgccgcataggtagagaggatc

SEQ ID NO: 3160 - DNA, 28 bp, Vibrio parahaemolyticus
  Vibrio parahaemolyticus A1EZ919
tcatcactactgaaaagtagctgataac

SEQ ID NO: 3161 - DNA, 28 bp, Vibrio parahaemolyticus
  Vibrio parahaemolyticus A1EZ919
gaatactgccgaacaggtaggaggctca

SEQ ID NO: 3162 - DNA, 31 bp, Vibrio parahaemolyticus; identical to SEQ ID NO: 1876
  Vibrio parahaemolyticus A1EZ919

SEQ ID NO: 3163 - DNA, 31 bp, Vibrio parahaemolyticus; identical to SEQ ID NO: 1877
  Vibrio parahaemolyticus A1EZ919

SEQ ID NO: 3164 - DNA, 31 bp, Vibrio parahaemolyticus; identical to SEQ ID NO: 1878
  Vibrio parahaemolyticus A1EZ919

SEQ ID NO: 3165 - DNA, 28 bp, Vibrio parahaemolyticus
  Vibrio parahaemolyticus 926501
gtgaactgccgaataggtagctgataat

SEQ ID NO: 3166 - DNA, 28 bp, Vibrio parahaemolyticus
  Vibrio parahaemolyticus 926501
gtgaactgccgcataggtagagaggatc

SEQ ID NO: 3167 - DNA, 28 bp, Vibrio parahaemolyticus
  Vibrio parahaemolyticus 926501
tcatcactactgaaaagtagctgataac

SEQ ID NO: 3168 - DNA, 28 bp, Vibrio parahaemolyticus
  Vibrio parahaemolyticus 926501
gaatactgccgaacaggtaggaggctca

SEQ ID NO: 3169 - DNA, 31 bp, Vibrio parahaemolyticus; identical to SEQ ID NO: 1876
  Vibrio parahaemolyticus 926501

SEQ ID NO: 3170 - DNA, 31 bp, Vibrio parahaemolyticus; identical to SEQ ID NO: 1877
  Vibrio parahaemolyticus 926501

SEQ ID NO: 3171 - DNA, 31 bp, Vibrio parahaemolyticus; identical to SEQ ID NO: 1878
  Vibrio parahaemolyticus 926501

SEQ ID NO: 3172 - DNA, 28 bp, Vibrio parahaemolyticus
  Vibrio parahaemolyticus A2EZ715
gtgaactgccgaataggtagctgataat

SEQ ID NO: 3173 - DNA, 28 bp, Vibrio parahaemolyticus
  Vibrio parahaemolyticus A2EZ715
gtgaactgccgcataggtagagaggatc

SEQ ID NO: 3174 - DNA, 28 bp, Vibrio parahaemolyticus
  Vibrio parahaemolyticus A2EZ715
tcatcactactgaaaagtagctgataac

SEQ ID NO: 3175 - DNA, 28 bp, Vibrio parahaemolyticus
  Vibrio parahaemolyticus A2EZ715
gaatactgccgaacaggtaggaggctca

SEQ ID NO: 3176 - DNA, 31 bp, Vibrio parahaemolyticus; identical to SEQ ID NO: 1876
  Vibrio parahaemolyticus A2EZ715

SEQ ID NO: 3177 - DNA, 31 bp, Vibrio parahaemolyticus; identical to SEQ ID NO: 1877
  Vibrio parahaemolyticus A2EZ715

SEQ ID NO: 3178 - DNA, 31 bp, Vibrio parahaemolyticus; identical to SEQ ID NO: 1878
  Vibrio parahaemolyticus A2EZ715

SEQ ID NO: 3179 - DNA, 28 bp, Vibrio parahaemolyticus
  Vibrio parahaemolyticus F63267
gtgaactgccgaataggtagctgataat

SEQ ID NO: 3180 - DNA, 28 bp, Vibrio parahaemolyticus
  Vibrio parahaemolyticus F63267
gtgaactgccgcataggtagagagaatc

SEQ ID NO: 3181 - DNA, 28 bp, Vibrio parahaemolyticus
  Vibrio parahaemolyticus F63267
tcattactactaaaaagtagctgataac

SEQ ID NO: 3182 - DNA, 28 bp, Vibrio parahaemolyticus
  Vibrio parahaemolyticus F63267
gaatactgccgaacaggtaggaggctca

SEQ ID NO: 3183 - DNA, 32 bp, Vibrio parahaemolyticus; identical to SEQ ID NO: 1946
  Vibrio parahaemolyticus F63267

SEQ ID NO: 3184 - DNA, 31 bp, Vibrio parahaemolyticus; identical to SEQ ID NO: 1947
  Vibrio parahaemolyticus F63267

SEQ ID NO: 3185 - DNA, 31 bp, Vibrio parahaemolyticus; identical to SEQ ID NO: 1877
  Vibrio parahaemolyticus F63267

SEQ ID NO: 3186 - DNA, 31 bp, Vibrio parahaemolyticus; identical to SEQ ID NO: 1878
  Vibrio parahaemolyticus F63267

SEQ ID NO: 3187 - DNA, 28 bp, Vibrio parahaemolyticus
  Vibrio parahaemolyticus A3EZ710
gtgaactgccgaataggtagctgataat

SEQ ID NO: 3188 - DNA, 28 bp, Vibrio parahaemolyticus
  Vibrio parahaemolyticus A3EZ710
gtgaactgccgcataggtagagaggatc

SEQ ID NO: 3189 - DNA, 28 bp, Vibrio parahaemolyticus
  Vibrio parahaemolyticus A3EZ710
tcatcactactgaaaagtagctgataac

SEQ ID NO: 3190 - DNA, 28 bp, Vibrio parahaemolyticus
  Vibrio parahaemolyticus A3EZ710
gaatactgccgaacaggtaggaggctca

SEQ ID NO: 3191 - DNA, 31 bp, Vibrio parahaemolyticus; identical to SEQ ID NO: 1876
  Vibrio parahaemolyticus A3EZ710

SEQ ID NO: 3192 - DNA, 31 bp, Vibrio parahaemolyticus; identical to SEQ ID NO: 1877
  Vibrio parahaemolyticus A3EZ710

SEQ ID NO: 3193 - DNA, 31 bp, Vibrio parahaemolyticus; identical to SEQ ID NO: 1970
  Vibrio parahaemolyticus A3EZ710

SEQ ID NO: 3194 - DNA, 28 bp, Vibrio parahaemolyticus
  Vibrio parahaemolyticus A3EZ936
gtgaactgccgaataggtagctgataat

SEQ ID NO: 3195 - DNA, 28 bp, Vibrio parahaemolyticus
  Vibrio parahaemolyticus A3EZ936
gtgaactgccgaataggtagagaggatc

SEQ ID NO: 3196 - DNA, 28 bp, Vibrio parahaemolyticus
  Vibrio parahaemolyticus A3EZ936
tcattactactgaaaagtagctgataac

SEQ ID NO: 3197 - DNA, 28 bp, Vibrio parahaemolyticus
  Vibrio parahaemolyticus A3EZ936
gaatactgccgaacaggtaggaggctca

SEQ ID NO: 3198 - DNA, 32 bp, Vibrio parahaemolyticus; identical to SEQ ID NO: 2310
  Vibrio parahaemolyticus A3EZ936

SEQ ID NO: 3199 - DNA, 31 bp, Vibrio parahaemolyticus; identical to SEQ ID NO: 1877
  Vibrio parahaemolyticus A3EZ936

SEQ ID NO: 3200 - DNA, 31 bp, Vibrio parahaemolyticus; identical to SEQ ID NO: 1878
  Vibrio parahaemolyticus A3EZ936

SEQ ID NO: 3201 - DNA, 28 bp, Vibrio parahaemolyticus
  Vibrio parahaemolyticus C147
gtgaactgccgaataggtagctgataat

SEQ ID NO: 3202 - DNA, 28 bp, Vibrio parahaemolyticus
  Vibrio parahaemolyticus C147
gtgaactgccgcataggtagagaggatc

SEQ ID NO: 3203 - DNA, 28 bp, Vibrio parahaemolyticus
  Vibrio parahaemolyticus C147
tcatcactactgaaaagtagctgataac

SEQ ID NO: 3204 - DNA, 28 bp, Vibrio parahaemolyticus
  Vibrio parahaemolyticus C147
gaatactgccgaacaggtaggaggctca

SEQ ID NO: 3205 - DNA, 31 bp, Vibrio parahaemolyticus; identical to SEQ ID NO: 1876
  Vibrio parahaemolyticus C147

SEQ ID NO: 3206 - DNA, 31 bp, Vibrio parahaemolyticus; identical to SEQ ID NO: 1877
  Vibrio parahaemolyticus C147

SEQ ID NO: 3207 - DNA, 31 bp, Vibrio parahaemolyticus; identical to SEQ ID NO: 1878
  Vibrio parahaemolyticus C147

SEQ ID NO: 3208 - DNA, 28 bp, Vibrio parahaemolyticus
  Vibrio parahaemolyticus C140
gtgaactgccgaataggtagctgataat

SEQ ID NO: 3209 - DNA, 28 bp, Vibrio parahaemolyticus
  Vibrio parahaemolyticus C140
gtgaactgccgcataggtagagagaatc

SEQ ID NO: 3210 - DNA, 28 bp, Vibrio parahaemolyticus
  Vibrio parahaemolyticus C140
tcattactactaaaaagtagctgataac

SEQ ID NO: 3211 - DNA, 28 bp, Vibrio parahaemolyticus
  Vibrio parahaemolyticus C140
gaatactgccgaacaggtaggaggctca

SEQ ID NO: 3212 - DNA, 32 bp, Vibrio parahaemolyticus; identical to SEQ ID NO: 2034
  Vibrio parahaemolyticus C140

SEQ ID NO: 3213 - DNA, 32 bp, Vibrio parahaemolyticus; identical to SEQ ID NO: 2035
  Vibrio parahaemolyticus C140

SEQ ID NO: 3214 - DNA, 31 bp, Vibrio parahaemolyticus; identical to SEQ ID NO: 1947
  Vibrio parahaemolyticus C140

SEQ ID NO: 3215 - DNA, 31 bp, Vibrio parahaemolyticus; identical to SEQ ID NO: 1877
  Vibrio parahaemolyticus C140

SEQ ID NO: 3216 - DNA, 31 bp, Vibrio parahaemolyticus; identical to SEQ ID NO: 1878
  Vibrio parahaemolyticus C140

SEQ ID NO: 3217 - DNA, 28 bp, Vibrio parahaemolyticus
  Vibrio parahaemolyticus A5Z924
gtgaactgccgaataggtagctgataat

SEQ ID NO: 3218 - DNA, 28 bp, Vibrio parahaemolyticus
  Vibrio parahaemolyticus A5Z924
gtgaactgccgcataggtagagaggatc

SEQ ID NO: 3219 - DNA, 28 bp, Vibrio parahaemolyticus
  Vibrio parahaemolyticus A5Z924
tcatcactactgaaaagtagctgataac

SEQ ID NO: 3220 - DNA, 28 bp, Vibrio parahaemolyticus
  Vibrio parahaemolyticus A5Z924
gaatactgccgaacaggtaggaggctca

SEQ ID NO: 3221 - DNA, 31 bp, Vibrio parahaemolyticus; identical to SEQ ID NO: 1876
  Vibrio parahaemolyticus A5Z924

SEQ ID NO: 3222 - DNA, 31 bp, Vibrio parahaemolyticus; identical to SEQ ID NO: 1877
  Vibrio parahaemolyticus A5Z924

SEQ ID NO: 3223 - DNA, 31 bp, Vibrio parahaemolyticus; identical to SEQ ID NO: 1878
  Vibrio parahaemolyticus A5Z924

SEQ ID NO: 3224 - DNA, 28 bp, Vibrio parahaemolyticus
  Vibrio parahaemolyticus CFSAN025065
gtgaactgccgaataggtagctgataat

SEQ ID NO: 3225 - DNA, 28 bp, Vibrio parahaemolyticus
  Vibrio parahaemolyticus CFSAN025065
gtgaactgccgcataggtagagagaatc

SEQ ID NO: 3226 - DNA, 28 bp, Vibrio parahaemolyticus
  Vibrio parahaemolyticus CFSAN025065
tcattactactaaaaagtagctgataac

SEQ ID NO: 3227 - DNA, 28 bp, Vibrio parahaemolyticus
  Vibrio parahaemolyticus CFSAN025065
gaatactgccgaacaggtaggaggctca

SEQ ID NO: 3228 - DNA, 32 bp, Vibrio parahaemolyticus; identical to SEQ ID NO: 2034
  Vibrio parahaemolyticus CFSAN025065

SEQ ID NO: 3229 - DNA, 32 bp, Vibrio parahaemolyticus; identical to SEQ ID NO: 2035
  Vibrio parahaemolyticus CFSAN025065

SEQ ID NO: 3230 - DNA, 31 bp, Vibrio parahaemolyticus; identical to SEQ ID NO: 1947
  Vibrio parahaemolyticus CFSAN025065

SEQ ID NO: 3231 - DNA, 31 bp, Vibrio parahaemolyticus; identical to SEQ ID NO: 1877
  Vibrio parahaemolyticus CFSAN025065

SEQ ID NO: 3232 - DNA, 31 bp, Vibrio parahaemolyticus; identical to SEQ ID NO: 2038
  Vibrio parahaemolyticus CFSAN025065

SEQ ID NO: 3233 - DNA, 28 bp, Vibrio parahaemolyticus
  Vibrio parahaemolyticus CFSAN025059
gtgaactgccgaataggtagctgataat

SEQ ID NO: 3234 - DNA, 28 bp, Vibrio parahaemolyticus
  Vibrio parahaemolyticus CFSAN025059
gtgaactgccgcataggtagagagaatc

SEQ ID NO: 3235 - DNA, 28 bp, Vibrio parahaemolyticus
  Vibrio parahaemolyticus CFSAN025059
tcattactactaaaaagtagctgataac

SEQ ID NO: 3236 - DNA, 28 bp, Vibrio parahaemolyticus
  Vibrio parahaemolyticus CFSAN025059
gaatactgccgaacaggtaggaggctca

SEQ ID NO: 3237 - DNA, 32 bp, Vibrio parahaemolyticus; identical to SEQ ID NO: 2034
  Vibrio parahaemolyticus CFSAN025059

SEQ ID NO: 3238 - DNA, 32 bp, Vibrio parahaemolyticus; identical to SEQ ID NO: 2035
  Vibrio parahaemolyticus CFSAN025059

SEQ ID NO: 3239 - DNA, 31 bp, Vibrio parahaemolyticus; identical to SEQ ID NO: 1947
  Vibrio parahaemolyticus CFSAN025059

SEQ ID NO: 3240 - DNA, 31 bp, Vibrio parahaemolyticus; identical to SEQ ID NO: 1877
  Vibrio parahaemolyticus CFSAN025059

SEQ ID NO: 3241 - DNA, 31 bp, Vibrio parahaemolyticus; identical to SEQ ID NO: 2038
  Vibrio parahaemolyticus CFSAN025059

SEQ ID NO: 3242 - DNA, 28 bp, Vibrio parahaemolyticus
  Vibrio parahaemolyticus CFSAN025053
gtgaactgccgaataggtagctgataat

SEQ ID NO: 3243 - DNA, 28 bp, Vibrio parahaemolyticus
  Vibrio parahaemolyticus CFSAN025053
gtgaactgccgcataggtagagagaatc

SEQ ID NO: 3244 - DNA, 28 bp, Vibrio parahaemolyticus
  Vibrio parahaemolyticus CFSAN025053
tcattactactaaaaagtagctgataac

SEQ ID NO: 3245 - DNA, 28 bp, Vibrio parahaemolyticus
  Vibrio parahaemolyticus CFSAN025053
gaatactgccgaacaggtaggaggctca

SEQ ID NO: 3246 - DNA, 32 bp, Vibrio parahaemolyticus; identical to SEQ ID NO: 2034
  Vibrio parahaemolyticus CFSAN025053

SEQ ID NO: 3247 - DNA, 32 bp, Vibrio parahaemolyticus; identical to SEQ ID NO: 2035
  Vibrio parahaemolyticus CFSAN025053

SEQ ID NO: 3248 - DNA, 31 bp, Vibrio parahaemolyticus; identical to SEQ ID NO: 1947
  Vibrio parahaemolyticus CFSAN025053

SEQ ID NO: 3249 - DNA, 31 bp, Vibrio parahaemolyticus; identical to SEQ ID NO: 1877
  Vibrio parahaemolyticus CFSAN025053

SEQ ID NO: 3250 - DNA, 31 bp, Vibrio parahaemolyticus; identical to SEQ ID NO: 2038
  Vibrio parahaemolyticus CFSAN025053

SEQ ID NO: 3251 - DNA, 28 bp, Vibrio anguillarum
  Vibrio anguillarum 90-11-286
gtgaactgccgagtaggcagctgataat

SEQ ID NO: 3252 - DNA, 28 bp, Vibrio anguillarum
  Vibrio anguillarum 90-11-286
gtgaactgccgagtaggcagagtgcatc

SEQ ID NO: 3253 - DNA, 28 bp, Vibrio anguillarum
  Vibrio anguillarum 90-11-286
ccacactgctgcaaagtagttgataaca

SEQ ID NO: 3254 - DNA, 28 bp, Vibrio anguillarum
  Vibrio anguillarum 90-11-286
ctttactgctgaataagtagctaactac

SEQ ID NO: 3255 - DNA, 32 bp, Vibrio anguillarum
  Vibrio anguillarum 90-11-286
acaagagcaagcaaccaccattagtgcgttgg

SEQ ID NO: 3256 - DNA, 31 bp, Vibrio anguillarum
  Vibrio anguillarum 90-11-286
aacgaaccaccttcattcgagtacaagagca

SEQ ID NO: 3257 - DNA, 31 bp, Vibrio anguillarum
  Vibrio anguillarum 90-11-286
agcgcaccacatttatccgtgttcaagagca

SEQ ID NO: 3258 - DNA, 28 bp, Vibrio parahaemolyticus
  Vibrio parahaemolyticus -
gtgaactgccgaataggtagctgataat

SEQ ID NO: 3259 - DNA, 28 bp, Vibrio parahaemolyticus
  Vibrio parahaemolyticus -
gtgaactgccgcataggtagagaggatc

SEQ ID NO: 3260 - DNA, 28 bp, Vibrio parahaemolyticus
  Vibrio parahaemolyticus -
tcatcactactgaaaagtagctgataac

SEQ ID NO: 3261 - DNA, 28 bp, Vibrio parahaemolyticus
  Vibrio parahaemolyticus -
gaatactgccgaacaggtaggaggctca

SEQ ID NO: 3262 - DNA, 31 bp, Vibrio parahaemolyticus; identical to SEQ ID NO: 1876
  Vibrio parahaemolyticus -

SEQ ID NO: 3263 - DNA, 31 bp, Vibrio parahaemolyticus; identical to SEQ ID NO: 1877
  Vibrio parahaemolyticus -

SEQ ID NO: 3264 - DNA, 31 bp, Vibrio parahaemolyticus; identical to SEQ ID NO: 1878
  Vibrio parahaemolyticus -

SEQ ID NO: 3265 - DNA, 28 bp, Vibrio parahaemolyticus
  Vibrio parahaemolyticus Klin
gtgaactgccgaataggtagctgataat

SEQ ID NO: 3266 - DNA, 28 bp, Vibrio parahaemolyticus
  Vibrio parahaemolyticus Klin
gtgaactgccgcataggtagagagaatc

SEQ ID NO: 3267 - DNA, 28 bp, Vibrio parahaemolyticus
  Vibrio parahaemolyticus Klin
tcattactactaaaaagtagctgataac

SEQ ID NO: 3268 - DNA, 28 bp, Vibrio parahaemolyticus
  Vibrio parahaemolyticus Klin
gaatactgccgaacaggtaggaggctca

SEQ ID NO: 3269 - DNA, 32 bp, Vibrio parahaemolyticus; identical to SEQ ID NO: 1946
  Vibrio parahaemolyticus Klin

SEQ ID NO: 3270 - DNA, 31 bp, Vibrio parahaemolyticus; identical to SEQ ID NO: 1947
  Vibrio parahaemolyticus Klin

SEQ ID NO: 3271 - DNA, 31 bp, Vibrio parahaemolyticus; identical to SEQ ID NO: 1877
  Vibrio parahaemolyticus Klin

SEQ ID NO: 3272 - DNA, 31 bp, Vibrio parahaemolyticus; identical to SEQ ID NO: 1878
  Vibrio parahaemolyticus Klin

SEQ ID NO: 3273 - DNA, 28 bp, Vibrio parahaemolyticus
  Vibrio parahaemolyticus GCSL_R31
gtgaactgccgaataggtagctgataat

SEQ ID NO: 3274 - DNA, 28 bp, Vibrio parahaemolyticus
  Vibrio parahaemolyticus GCSL_R31
atgaactgccgaataggtagagaggagc

SEQ ID NO: 3275 - DNA, 28 bp, Vibrio parahaemolyticus
  Vibrio parahaemolyticus GCSL_R31
tcattactacttaaaagtagctgataac

SEQ ID NO: 3276 - DNA, 28 bp, Vibrio parahaemolyticus
  Vibrio parahaemolyticus GCSL_R31
gaatactgccgaacaggtaggaggctca

SEQ ID NO: 3277 - DNA, 31 bp, Vibrio parahaemolyticus; identical to SEQ ID NO: 1897
  Vibrio parahaemolyticus GCSL_R31

SEQ ID NO: 3278 - DNA, 31 bp, Vibrio parahaemolyticus; identical to SEQ ID NO: 1877
  Vibrio parahaemolyticus GCSL_R31

SEQ ID NO: 3279 - DNA, 31 bp, Vibrio parahaemolyticus; identical to SEQ ID NO: 1970
  Vibrio parahaemolyticus GCSL_R31

SEQ ID NO: 3280 - DNA, 28 bp, Vibrio parahaemolyticus
  Vibrio parahaemolyticus GCSL_R146
gtgaactgccgaataggtagctgataat

SEQ ID NO: 3281 - DNA, 28 bp, Vibrio parahaemolyticus
  Vibrio parahaemolyticus GCSL_R146
atgaactgccgaataggtagagaggagc

SEQ ID NO: 3282 - DNA, 28 bp, Vibrio parahaemolyticus
  Vibrio parahaemolyticus GCSL_R146
tcattactacttaaaagtagctgataac

SEQ ID NO: 3283 - DNA, 28 bp, Vibrio parahaemolyticus
  Vibrio parahaemolyticus GCSL_R146
gaatactgccgaacaggtaggaggctca

SEQ ID NO: 3284 - DNA, 31 bp, Vibrio parahaemolyticus; identical to SEQ ID NO: 1897
  Vibrio parahaemolyticus GCSL_R146

SEQ ID NO: 3285 - DNA, 31 bp, Vibrio parahaemolyticus; identical to SEQ ID NO: 1877
  Vibrio parahaemolyticus GCSL_R146

SEQ ID NO: 3286 - DNA, 31 bp, Vibrio parahaemolyticus; identical to SEQ ID NO: 1970
  Vibrio parahaemolyticus GCSL_R146

SEQ ID NO: 3287 - DNA, 28 bp, Vibrio parahaemolyticus
  Vibrio parahaemolyticus GCSL_R150
gtgaactgccgaataggtagctgataat

SEQ ID NO: 3288 - DNA, 28 bp, Vibrio parahaemolyticus
  Vibrio parahaemolyticus GCSL_R150
atgaactgccgaataggtagagaggagc

SEQ ID NO: 3289 - DNA, 28 bp, Vibrio parahaemolyticus
  Vibrio parahaemolyticus GCSL_R150
tcattactacttaaaagtagctgataac

SEQ ID NO: 3290 - DNA, 28 bp, Vibrio parahaemolyticus
  Vibrio parahaemolyticus GCSL_R150
gaatactgccgaacaggtaggaggctca

SEQ ID NO: 3291 - DNA, 31 bp, Vibrio parahaemolyticus; identical to SEQ ID NO: 1897
  Vibrio parahaemolyticus GCSL_R150

SEQ ID NO: 3292 - DNA, 31 bp, Vibrio parahaemolyticus; identical to SEQ ID NO: 1877
  Vibrio parahaemolyticus GCSL_R150

SEQ ID NO: 3293 - DNA, 31 bp, Vibrio parahaemolyticus; identical to SEQ ID NO: 1970
  Vibrio parahaemolyticus GCSL_R150

SEQ ID NO: 3294 - DNA, 28 bp, Vibrio parahaemolyticus
  Vibrio parahaemolyticus CDC_K5281
gtgaactgccgaataggtagctgataat

SEQ ID NO: 3295 - DNA, 28 bp, Vibrio parahaemolyticus
  Vibrio parahaemolyticus CDC_K5281
gtgaactgccgcataggtagagaggatc

SEQ ID NO: 3296 - DNA, 28 bp, Vibrio parahaemolyticus
  Vibrio parahaemolyticus CDC_K5281
tcatcactactgaaaagtagctgataac

SEQ ID NO: 3297 - DNA, 28 bp, Vibrio parahaemolyticus
  Vibrio parahaemolyticus CDC_K5281
gaatactgccgaacaggtaggaggctca

SEQ ID NO: 3298 - DNA, 31 bp, Vibrio parahaemolyticus; identical to SEQ ID NO: 1876
  Vibrio parahaemolyticus CDC_K5281

SEQ ID NO: 3299 - DNA, 31 bp, Vibrio parahaemolyticus; identical to SEQ ID NO: 1877
  Vibrio parahaemolyticus CDC_K5281

SEQ ID NO: 3300 - DNA, 31 bp, Vibrio parahaemolyticus; identical to SEQ ID NO: 1878
  Vibrio parahaemolyticus CDC_K5281

SEQ ID NO: 3301 - DNA, 28 bp, Vibrio parahaemolyticus
  Vibrio parahaemolyticus CDC_K4764D
gtgaactgccgaataggtagctgataat

SEQ ID NO: 3302 - DNA, 28 bp, Vibrio parahaemolyticus
  Vibrio parahaemolyticus CDC_K4764D
atgaactgccgaataggtagagaggagc

SEQ ID NO: 3303 - DNA, 28 bp, Vibrio parahaemolyticus
  Vibrio parahaemolyticus CDC_K4764D
tcattactacttaaaagtagctgataac

SEQ ID NO: 3304 - DNA, 28 bp, Vibrio parahaemolyticus
  Vibrio parahaemolyticus CDC_K4764D
gaatactgccgaacaggtaggaggctca

SEQ ID NO: 3305 - DNA, 31 bp, Vibrio parahaemolyticus; identical to SEQ ID NO: 1897
  Vibrio parahaemolyticus CDC_K4764D

SEQ ID NO: 3306 - DNA, 31 bp, Vibrio parahaemolyticus; identical to SEQ ID NO: 1877
  Vibrio parahaemolyticus CDC_K4764D

SEQ ID NO: 3307 - DNA, 31 bp, Vibrio parahaemolyticus; identical to SEQ ID NO: 1970
  Vibrio parahaemolyticus CDC_K4764D

SEQ ID NO: 3308 - DNA, 28 bp, Vibrio parahaemolyticus
  Vibrio parahaemolyticus CDC_K5331
gtgaactgccgaataggtagctgataat

SEQ ID NO: 3309 - DNA, 28 bp, Vibrio parahaemolyticus
  Vibrio parahaemolyticus CDC_K5331
gtgaactgccgcataggtagagagaatc

SEQ ID NO: 3310 - DNA, 28 bp, Vibrio parahaemolyticus
  Vibrio parahaemolyticus CDC_K5331
tcattactactaaaaagtagctgataac

SEQ ID NO: 3311 - DNA, 28 bp, Vibrio parahaemolyticus
  Vibrio parahaemolyticus CDC_K5331
gaatactgccgaacaggtaggaggctca

SEQ ID NO: 3312 - DNA, 32 bp, Vibrio parahaemolyticus; identical to SEQ ID NO: 2035
  Vibrio parahaemolyticus CDC_K5331

SEQ ID NO: 3313 - DNA, 31 bp, Vibrio parahaemolyticus; identical to SEQ ID NO: 1947
  Vibrio parahaemolyticus CDC_K5331

SEQ ID NO: 3314 - DNA, 31 bp, Vibrio parahaemolyticus; identical to SEQ ID NO: 1877
  Vibrio parahaemolyticus CDC_K5331

SEQ ID NO: 3315 - DNA, 31 bp, Vibrio parahaemolyticus; identical to SEQ ID NO: 1878
  Vibrio parahaemolyticus CDC_K5331

SEQ ID NO: 3316 - DNA, 28 bp, Vibrio parahaemolyticus
  Vibrio parahaemolyticus CDC_K5512
gtgaactgccgaataggtagctgataat

SEQ ID NO: 3317 - DNA, 28 bp, Vibrio parahaemolyticus
  Vibrio parahaemolyticus CDC_K5512
gtgaactgccgcataggtagagaggatc

SEQ ID NO: 3318 - DNA, 28 bp, Vibrio parahaemolyticus
  Vibrio parahaemolyticus CDC_K5512
tcatcactactgaaaagtagctgataac

SEQ ID NO: 3319 - DNA, 28 bp, Vibrio parahaemolyticus
  Vibrio parahaemolyticus CDC_K5512
gaatactgccgaacaggtaggaggctca

SEQ ID NO: 3320 - DNA, 31 bp, Vibrio parahaemolyticus; identical to SEQ ID NO: 1876
  Vibrio parahaemolyticus CDC_K5512

SEQ ID NO: 3321 - DNA, 31 bp, Vibrio parahaemolyticus; identical to SEQ ID NO: 1877
  Vibrio parahaemolyticus CDC_K5512

SEQ ID NO: 3322 - DNA, 31 bp, Vibrio parahaemolyticus; identical to SEQ ID NO: 1878
  Vibrio parahaemolyticus CDC_K5512

SEQ ID NO: 3323 - DNA, 28 bp, Vibrio parahaemolyticus
  Vibrio parahaemolyticus CDC_K5638
gtgaactgccgaataggtagctgataat

SEQ ID NO: 3324 - DNA, 28 bp, Vibrio parahaemolyticus
  Vibrio parahaemolyticus CDC_K5638
gtgaactgccgcataggtagagaggatc

SEQ ID NO: 3325 - DNA, 28 bp, Vibrio parahaemolyticus
  Vibrio parahaemolyticus CDC_K5638
tcatcactactgaaaagtagctgataac

SEQ ID NO: 3326 - DNA, 28 bp, Vibrio parahaemolyticus
  Vibrio parahaemolyticus CDC_K5638
gaatactgccgaacaggtaggaggctca

SEQ ID NO: 3327 - DNA, 31 bp, Vibrio parahaemolyticus; identical to SEQ ID NO: 1876
  Vibrio parahaemolyticus CDC_K5638

SEQ ID NO: 3328 - DNA, 31 bp, Vibrio parahaemolyticus; identical to SEQ ID NO: 1877
  Vibrio parahaemolyticus CDC_K5638

SEQ ID NO: 3329 - DNA, 31 bp, Vibrio parahaemolyticus; identical to SEQ ID NO: 1878
  Vibrio parahaemolyticus CDC_K5638

SEQ ID NO: 3330 - DNA, 28 bp, Vibrio parahaemolyticus
  Vibrio parahaemolyticus GIMxtfL61-2011.05
gtgaactgccgaataggtagctgataat

SEQ ID NO: 3331 - DNA, 28 bp, Vibrio parahaemolyticus
  Vibrio parahaemolyticus GIMxtfL61-2011.05
gtgaactgccgcataggtagagagaatc

SEQ ID NO: 3332 - DNA, 28 bp, Vibrio parahaemolyticus
  Vibrio parahaemolyticus GIMxtfL61-2011.05
tcattactactaaaaagtagctgataac

SEQ ID NO: 3333 - DNA, 28 bp, Vibrio parahaemolyticus
  Vibrio parahaemolyticus GIMxtfL61-2011.05
gaatactgccgaacaggtaggaggctca

SEQ ID NO: 3334 - DNA, 32 bp, Vibrio parahaemolyticus; identical to SEQ ID NO: 1946
  Vibrio parahaemolyticus GIMxtfL61-2011.05

SEQ ID NO: 3335 - DNA, 31 bp, Vibrio parahaemolyticus; identical to SEQ ID NO: 1947
  Vibrio parahaemolyticus GIMxtfL61-2011.05

SEQ ID NO: 3336 - DNA, 31 bp, Vibrio parahaemolyticus; identical to SEQ ID NO: 1877
  Vibrio parahaemolyticus GIMxtfL61-2011.05

SEQ ID NO: 3337 - DNA, 31 bp, Vibrio parahaemolyticus; identical to SEQ ID NO: 1878
  Vibrio parahaemolyticus GIMxtfL61-2011.05

SEQ ID NO: 3338 - DNA, 28 bp, Vibrio parahaemolyticus
  Vibrio parahaemolyticus GIMxtfL65-2011.05
gtgaactgccgaataggtagctgataat

SEQ ID NO: 3339 - DNA, 28 bp, Vibrio parahaemolyticus
  Vibrio parahaemolyticus GIMxtfL65-2011.05
gtgaactgccgcataggtagagagaatc

SEQ ID NO: 3340 - DNA, 28 bp, Vibrio parahaemolyticus
  Vibrio parahaemolyticus GIMxtfL65-2011.05
tcattactactaaaaagtagctgataac

SEQ ID NO: 3341 - DNA, 28 bp, Vibrio parahaemolyticus
  Vibrio parahaemolyticus GIMxtfL65-2011.05
gaatactgccgaacaggtaggaggctca

SEQ ID NO: 3342 - DNA, 32 bp, Vibrio parahaemolyticus; identical to SEQ ID NO: 1946
  Vibrio parahaemolyticus GIMxtfL65-2011.05

SEQ ID NO: 3343 - DNA, 31 bp, Vibrio parahaemolyticus; identical to SEQ ID NO: 1947
  Vibrio parahaemolyticus GIMxtfL65-2011.05

SEQ ID NO: 3344 - DNA, 31 bp, Vibrio parahaemolyticus; identical to SEQ ID NO: 1877
  Vibrio parahaemolyticus GIMxtfL65-2011.05

SEQ ID NO: 3345 - DNA, 31 bp, Vibrio parahaemolyticus; identical to SEQ ID NO: 1878
  Vibrio parahaemolyticus GIMxtfL65-2011.05

SEQ ID NO: 3346 - DNA, 28 bp, Vibrio parahaemolyticus
  Vibrio parahaemolyticus PMC53.7
gttcaccgccgcataggcagctgataat

SEQ ID NO: 3347 - DNA, 28 bp, Vibrio parahaemolyticus
  Vibrio parahaemolyticus PMC53.7
gttcaccgccgcataggcagatttaact

SEQ ID NO: 3348 - DNA, 28 bp, Vibrio parahaemolyticus
  Vibrio parahaemolyticus PMC53.7
cactactactgtaaaagtagctgataaa

SEQ ID NO: 3349 - DNA, 28 bp, Vibrio parahaemolyticus
  Vibrio parahaemolyticus PMC53.7
aattactgctgaataagtagatatttat

SEQ ID NO: 3350 - DNA, 32 bp, Vibrio parahaemolyticus; identical to SEQ ID NO: 2384
  Vibrio parahaemolyticus PMC53.7

SEQ ID NO: 3351 - DNA, 31 bp, Vibrio parahaemolyticus; identical to SEQ ID NO: 2385
  Vibrio parahaemolyticus PMC53.7

SEQ ID NO: 3352 - DNA, 31 bp, Vibrio parahaemolyticus; identical to SEQ ID NO: 2386
  Vibrio parahaemolyticus PMC53.7

SEQ ID NO: 3353 - DNA, 28 bp, Vibrio parahaemolyticus
  Vibrio parahaemolyticus PMA31.14
gtgaactgccgaataggtagctgataat

SEQ ID NO: 3354 - DNA, 28 bp, Vibrio parahaemolyticus
  Vibrio parahaemolyticus PMA31.14
gtgaactgccgcataggtagagaggatc

SEQ ID NO: 3355 - DNA, 28 bp, Vibrio parahaemolyticus
  Vibrio parahaemolyticus PMA31.14
tcatcactacttaaaagtagctgataac

SEQ ID NO: 3356 - DNA, 28 bp, Vibrio parahaemolyticus
  Vibrio parahaemolyticus PMA31.14
gaatactgccgaacaggtaggaggctca

SEQ ID NO: 3357 - DNA, 31 bp, Vibrio parahaemolyticus; identical to SEQ ID NO: 2018
  Vibrio parahaemolyticus PMA31.14

SEQ ID NO: 3358 - DNA, 31 bp, Vibrio parahaemolyticus; identical to SEQ ID NO: 1947
  Vibrio parahaemolyticus PMA31.14

SEQ ID NO: 3359 - DNA, 31 bp, Vibrio parahaemolyticus; identical to SEQ ID NO: 1877
  Vibrio parahaemolyticus PMA31.14

SEQ ID NO: 3360 - DNA, 31 bp, Vibrio parahaemolyticus; identical to SEQ ID NO: 2146
  Vibrio parahaemolyticus PMA31.14

SEQ ID NO: 3361 - DNA, 28 bp, Vibrio parahaemolyticus
  Vibrio parahaemolyticus CFSAN026730
gtgaactgccgaataggtagctgataat

SEQ ID NO: 3362 - DNA, 28 bp, Vibrio parahaemolyticus
  Vibrio parahaemolyticus CFSAN026730
gtgaactgccgcataggtagagaggatc

SEQ ID NO: 3363 - DNA, 28 bp, Vibrio parahaemolyticus
  Vibrio parahaemolyticus CFSAN026730
tcatcactactgaaaagtagctgataac

SEQ ID NO: 3364 - DNA, 28 bp, Vibrio parahaemolyticus
  Vibrio parahaemolyticus CFSAN026730
gaatactgccgaacaggtaggaggctca

SEQ ID NO: 3365 - DNA, 31 bp, Vibrio parahaemolyticus; identical to SEQ ID NO: 1876
  Vibrio parahaemolyticus CFSAN026730

SEQ ID NO: 3366 - DNA, 31 bp, Vibrio parahaemolyticus; identical to SEQ ID NO: 1877
  Vibrio parahaemolyticus CFSAN026730

SEQ ID NO: 3367 - DNA, 31 bp, Vibrio parahaemolyticus; identical to SEQ ID NO: 1878
  Vibrio parahaemolyticus CFSAN026730

SEQ ID NO: 3368 - DNA, 28 bp, Vibrio vulnificus
  Vibrio vulnificus VN-0206
gtgaactgccgagtaggtagctgataat

SEQ ID NO: 3369 - DNA, 28 bp, Vibrio vulnificus
  Vibrio vulnificus VN-0206
gtgaactgccgagtaggcagagtgcatc

SEQ ID NO: 3370 - DNA, 28 bp, Vibrio vulnificus
  Vibrio vulnificus VN-0206
tcacaactactgcaaagtagctgataac

SEQ ID NO: 3371 - DNA, 28 bp, Vibrio vulnificus
  Vibrio vulnificus VN-0206
ctttactgctgaataagtagataactac

SEQ ID NO: 3372 - DNA, 32 bp, Vibrio vulnificus
  Vibrio vulnificus VN-0206
aaacgtccgataaatcctctgttagttgagta

SEQ ID NO: 3373 - DNA, 32 bp, Vibrio vulnificus
  Vibrio vulnificus VN-0206
gcaacgtggagcgctcgccagtgattaatcgt

SEQ ID NO: 3374 - DNA, 32 bp, Vibrio vulnificus; identical to SEQ ID NO: 3019
  Vibrio vulnificus VN-0206

SEQ ID NO: 3375 - DNA, 28 bp, Vibrio parahaemolyticus
  Vibrio parahaemolyticus FDAARGOS_191
gtgaactgccgaataggtagctgataat

SEQ ID NO: 3376 - DNA, 28 bp, Vibrio parahaemolyticus
  Vibrio parahaemolyticus FDAARGOS_191
gtgaactgccgcataggtagagagaatc

SEQ ID NO: 3377 - DNA, 28 bp, Vibrio parahaemolyticus
  Vibrio parahaemolyticus FDAARGOS_191
tcattactactaaaaagtagctgataac

SEQ ID NO: 3378 - DNA, 28 bp, Vibrio parahaemolyticus
  Vibrio parahaemolyticus FDAARGOS_191
gaatactgccgaacaggtaggaggctca

SEQ ID NO: 3379 - DNA, 32 bp, Vibrio parahaemolyticus; identical to SEQ ID NO: 1946
  Vibrio parahaemolyticus FDAARGOS_191

SEQ ID NO: 3380 - DNA, 31 bp, Vibrio parahaemolyticus; identical to SEQ ID NO: 1947
  Vibrio parahaemolyticus FDAARGOS_191

SEQ ID NO: 3381 - DNA, 31 bp, Vibrio parahaemolyticus; identical to SEQ ID NO: 1877
  Vibrio parahaemolyticus FDAARGOS_191

SEQ ID NO: 3382 - DNA, 31 bp, Vibrio parahaemolyticus; identical to SEQ ID NO: 1878
  Vibrio parahaemolyticus FDAARGOS_191

SEQ ID NO: 3383 - DNA, 28 bp, Vibrio parahaemolyticus
  Vibrio parahaemolyticus Vp230
gttcgccgccgcataggcagctgataat

SEQ ID NO: 3384 - DNA, 28 bp, Vibrio parahaemolyticus
  Vibrio parahaemolyticus Vp230
gttcgccgccgcataggcagatttaact

SEQ ID NO: 3385 - DNA, 32 bp, Vibrio parahaemolyticus
  Vibrio parahaemolyticus Vp230
tccataaaatcctcaatacaaaggcttgtgaa

SEQ ID NO: 3386 - DNA, 28 bp, Vibrio parahaemolyticus
  Vibrio parahaemolyticus CFSAN001605
gtgaactgccgaataggtagctgataat

SEQ ID NO: 3387 - DNA, 28 bp, Vibrio parahaemolyticus
  Vibrio parahaemolyticus CFSAN001605
gtgaactgccgcataggtagagaggatc

SEQ ID NO: 3388 - DNA, 28 bp, Vibrio parahaemolyticus
  Vibrio parahaemolyticus CFSAN001605
tcatcactactgaaaagtagctgataac

SEQ ID NO: 3389 - DNA, 28 bp, Vibrio parahaemolyticus
  Vibrio parahaemolyticus CFSAN001605
gaatactgccgaacaggtaggaggctca

SEQ ID NO: 3390 - DNA, 31 bp, Vibrio parahaemolyticus; identical to SEQ ID NO: 1876
  Vibrio parahaemolyticus CFSAN001605

SEQ ID NO: 3391 - DNA, 31 bp, Vibrio parahaemolyticus; identical to SEQ ID NO: 1877
  Vibrio parahaemolyticus CFSAN001605

SEQ ID NO: 3392 - DNA, 31 bp, Vibrio parahaemolyticus; identical to SEQ ID NO: 1878
  Vibrio parahaemolyticus CFSAN001605

SEQ ID NO: 3393 - DNA, 28 bp, Vibrio parahaemolyticus
  Vibrio parahaemolyticus CFSAN001597
gtgaactgccgaataggtagctgataat

SEQ ID NO: 3394 - DNA, 28 bp, Vibrio parahaemolyticus
  Vibrio parahaemolyticus CFSAN001597
gtgaactgccgcataggtagagaggatc

SEQ ID NO: 3395 - DNA, 28 bp, Vibrio parahaemolyticus
  Vibrio parahaemolyticus CFSAN001597
tcatcactactgaaaagtagctgataac

SEQ ID NO: 3396 - DNA, 28 bp, Vibrio parahaemolyticus
  Vibrio parahaemolyticus CFSAN001597
gaatactgccgaacaggtaggaggctca

SEQ ID NO: 3397 - DNA, 31 bp, Vibrio parahaemolyticus; identical to SEQ ID NO: 1876
  Vibrio parahaemolyticus CFSAN001597

SEQ ID NO: 3398 - DNA, 31 bp, Vibrio parahaemolyticus; identical to SEQ ID NO: 1877
  Vibrio parahaemolyticus CFSAN001597

SEQ ID NO: 3399 - DNA, 31 bp, Vibrio parahaemolyticus; identical to SEQ ID NO: 1878
  Vibrio parahaemolyticus CFSAN001597

SEQ ID NO: 3400 - DNA, 28 bp, Vibrio parahaemolyticus
  Vibrio parahaemolyticus CFSAN022334
gtgaactgccgaataggtagctgataat

SEQ ID NO: 3401 - DNA, 28 bp, Vibrio parahaemolyticus
  Vibrio parahaemolyticus CFSAN022334
gtgaactgccgcataggtagagaggatc

SEQ ID NO: 3402 - DNA, 28 bp, Vibrio parahaemolyticus
  Vibrio parahaemolyticus CFSAN022334
tcatcactactgaaaagtagctgataac

SEQ ID NO: 3403 - DNA, 28 bp, Vibrio parahaemolyticus
  Vibrio parahaemolyticus CFSAN022334
gaatactgccgaacaggtaggaggctca

SEQ ID NO: 3404 - DNA, 31 bp, Vibrio parahaemolyticus; identical to SEQ ID NO: 1876
  Vibrio parahaemolyticus CFSAN022334

SEQ ID NO: 3405 - DNA, 31 bp, Vibrio parahaemolyticus; identical to SEQ ID NO: 1877
  Vibrio parahaemolyticus CFSAN022334

SEQ ID NO: 3406 - DNA, 31 bp, Vibrio parahaemolyticus; identical to SEQ ID NO: 1878
  Vibrio parahaemolyticus CFSAN022334

SEQ ID NO: 3407 - DNA, 28 bp, Vibrio parahaemolyticus
  Vibrio parahaemolyticus CFSAN022335
gtgaactgccgaataggtagctgataat

SEQ ID NO: 3408 - DNA, 28 bp, Vibrio parahaemolyticus
  Vibrio parahaemolyticus CFSAN022335
gtgaactgccgcataggtagagaggatc

SEQ ID NO: 3409 - DNA, 28 bp, Vibrio parahaemolyticus
  Vibrio parahaemolyticus CFSAN022335
tcatcactactgaaaagtagctgataac

SEQ ID NO: 3410 - DNA, 28 bp, Vibrio parahaemolyticus
  Vibrio parahaemolyticus CFSAN022335
gaatactgccgaacaggtaggaggctca

SEQ ID NO: 3411 - DNA, 31 bp, Vibrio parahaemolyticus; identical to SEQ ID NO: 1876
  Vibrio parahaemolyticus CFSAN022335

SEQ ID NO: 3412 - DNA, 31 bp, Vibrio parahaemolyticus; identical to SEQ ID NO: 1877
  Vibrio parahaemolyticus CFSAN022335

SEQ ID NO: 3413 - DNA, 31 bp, Vibrio parahaemolyticus; identical to SEQ ID NO: 1878
  Vibrio parahaemolyticus CFSAN022335

SEQ ID NO: 3414 - DNA, 28 bp, Vibrio parahaemolyticus
  Vibrio parahaemolyticus MAVP-T
gtgaactgccgaataggtagctgataat

SEQ ID NO: 3415 - DNA, 28 bp, Vibrio parahaemolyticus
  Vibrio parahaemolyticus MAVP-T
gtgaactgccgcataggtagagaggatc

SEQ ID NO: 3416 - DNA, 28 bp, Vibrio parahaemolyticus
  Vibrio parahaemolyticus MAVP-T
tcatcactactgaaaagtagctgataac

SEQ ID NO: 3417 - DNA, 28 bp, Vibrio parahaemolyticus
  Vibrio parahaemolyticus MAVP-T
gaatactgccgaacaggtaggaggctca

SEQ ID NO: 3418 - DNA, 31 bp, Vibrio parahaemolyticus; identical to SEQ ID NO: 1876
  Vibrio parahaemolyticus MAVP-T

SEQ ID NO: 3419 - DNA, 31 bp, Vibrio parahaemolyticus; identical to SEQ ID NO: 1877
  Vibrio parahaemolyticus MAVP-T

SEQ ID NO: 3420 - DNA, 31 bp, Vibrio parahaemolyticus; identical to SEQ ID NO: 1878
  Vibrio parahaemolyticus MAVP-T

SEQ ID NO: 3421 - DNA, 28 bp, Vibrio parahaemolyticus
  Vibrio parahaemolyticus MAVP74
gtgaactgccgaataggtagctgataat

SEQ ID NO: 3422 - DNA, 28 bp, Vibrio parahaemolyticus
  Vibrio parahaemolyticus MAVP74
gtgaactgccgcataggtagagaggatc

SEQ ID NO: 3423 - DNA, 28 bp, Vibrio parahaemolyticus
  Vibrio parahaemolyticus MAVP74
tcatcactactgaaaagtagctgataac

SEQ ID NO: 3424 - DNA, 28 bp, Vibrio parahaemolyticus
  Vibrio parahaemolyticus MAVP74
gaatactgccgaacaggtaggaggctca

SEQ ID NO: 3425 - DNA, 31 bp, Vibrio parahaemolyticus; identical to SEQ ID NO: 1876
  Vibrio parahaemolyticus MAVP74

SEQ ID NO: 3426 - DNA, 31 bp, Vibrio parahaemolyticus; identical to SEQ ID NO: 1877
  Vibrio parahaemolyticus MAVP74

SEQ ID NO: 3427 - DNA, 31 bp, Vibrio parahaemolyticus; identical to SEQ ID NO: 1878
  Vibrio parahaemolyticus MAVP74

SEQ ID NO: 3428 - DNA, 28 bp, Vibrio mediterranei
  Vibrio mediterranei QT6D1
gtgaactgccgagtaggtagctgataat

SEQ ID NO: 3429 - DNA, 28 bp, Vibrio mediterranei
  Vibrio mediterranei QT6D1
gtgaactgccgagtaggtagagtacatt

SEQ ID NO: 3430 - DNA, 28 bp, Vibrio mediterranei
  Vibrio mediterranei QT6D1
tcaaaactactgtaaagtagctgataat

SEQ ID NO: 3431 - DNA, 28 bp, Vibrio mediterranei
  Vibrio mediterranei QT6D1
aattactgctgaataagtagctaaggaa

SEQ ID NO: 3432 - DNA, 32 bp, Vibrio mediterranei
  Vibrio mediterranei QT6D1
agctcgaatgacaggggtctagggtcagacag

SEQ ID NO: 3433 - DNA, 32 bp, Vibrio mediterranei; identical to SEQ ID NO: 2980
  Vibrio mediterranei QT6D1

SEQ ID NO: 3434 - DNA, 32 bp, Vibrio mediterranei
  Vibrio mediterranei QT6D1
aagcgtacgactttcatccgtgtacaagaaca

SEQ ID NO: 3435 - DNA, 28 bp, Vibrio parahaemolyticus
  Vibrio parahaemolyticus MAVP-71
gtgaactgccgaataggtagctgataat

SEQ ID NO: 3436 - DNA, 28 bp, Vibrio parahaemolyticus
  Vibrio parahaemolyticus MAVP-71
gtgaactgccgcataggtagagaggatc

SEQ ID NO: 3437 - DNA, 28 bp, Vibrio parahaemolyticus
  Vibrio parahaemolyticus MAVP-71
tcatcactactgaaaagtagctgataac

SEQ ID NO: 3438 - DNA, 28 bp, Vibrio parahaemolyticus
  Vibrio parahaemolyticus MAVP-71
gaatactgccgaacaggtaggaggctca

SEQ ID NO: 3439 - DNA, 31 bp, Vibrio parahaemolyticus; identical to SEQ ID NO: 1876
  Vibrio parahaemolyticus MAVP-71

SEQ ID NO: 3440 - DNA, 31 bp, Vibrio parahaemolyticus; identical to SEQ ID NO: 1877
  Vibrio parahaemolyticus MAVP-71

SEQ ID NO: 3441 - DNA, 31 bp, Vibrio parahaemolyticus; identical to SEQ ID NO: 1970
  Vibrio parahaemolyticus MAVP-71

SEQ ID NO: 3442 - DNA, 28 bp, Vibrio parahaemolyticus
  Vibrio parahaemolyticus CTVP31C
gtgaactgccgaataggtagctgataat

SEQ ID NO: 3443 - DNA, 28 bp, Vibrio parahaemolyticus
  Vibrio parahaemolyticus CTVP31C
gtgaactgccgcataggtagagaggatc

SEQ ID NO: 3444 - DNA, 28 bp, Vibrio parahaemolyticus
  Vibrio parahaemolyticus CTVP31C
tcatcactactgaaaagtagctgataac

SEQ ID NO: 3445 - DNA, 28 bp, Vibrio parahaemolyticus
  Vibrio parahaemolyticus CTVP31C
gaatactgccgaacaggtaggaggctca

SEQ ID NO: 3446 - DNA, 31 bp, Vibrio parahaemolyticus; identical to SEQ ID NO: 1876
  Vibrio parahaemolyticus CTVP31C

SEQ ID NO: 3447 - DNA, 31 bp, Vibrio parahaemolyticus; identical to SEQ ID NO: 1877
  Vibrio parahaemolyticus CTVP31C

SEQ ID NO: 3448 - DNA, 31 bp, Vibrio parahaemolyticus; identical to SEQ ID NO: 1878
  Vibrio parahaemolyticus CTVP31C

SEQ ID NO: 3449 - DNA, 28 bp, Vibrio parahaemolyticus
  Vibrio parahaemolyticus L70
gtgaactgccgaataggtagctgataat

SEQ ID NO: 3450 - DNA, 28 bp, Vibrio parahaemolyticus
  Vibrio parahaemolyticus L70
gtgaactgccgcataggtagagagaatc

SEQ ID NO: 3451 - DNA, 28 bp, Vibrio parahaemolyticus
  Vibrio parahaemolyticus L70
tcattactactaaaaagtagctgataac

SEQ ID NO: 3452 - DNA, 28 bp, Vibrio parahaemolyticus
  Vibrio parahaemolyticus L70
gaatactgccgaacaggtaggaggctca

SEQ ID NO: 3453 - DNA, 32 bp, Vibrio parahaemolyticus; identical to SEQ ID NO: 1946
  Vibrio parahaemolyticus L70

SEQ ID NO: 3454 - DNA, 31 bp, Vibrio parahaemolyticus; identical to SEQ ID NO: 1947
  Vibrio parahaemolyticus L70

SEQ ID NO: 3455 - DNA, 31 bp, Vibrio parahaemolyticus; identical to SEQ ID NO: 1877
  Vibrio parahaemolyticus L70

SEQ ID NO: 3456 - DNA, 31 bp, Vibrio parahaemolyticus; identical to SEQ ID NO: 1878
  Vibrio parahaemolyticus L70

SEQ ID NO: 3457 - DNA, 28 bp, Vibrio mediterranei
  Vibrio mediterranei 117-T6
gtgaactgccgagtaggtagctgataat

SEQ ID NO: 3458 - DNA, 28 bp, Vibrio mediterranei
  Vibrio mediterranei 117-T6
gtgaactgccgagtaggtagagtacatt

SEQ ID NO: 3459 - DNA, 28 bp, Vibrio mediterranei
  Vibrio mediterranei 117-T6
tcaaaactactgtaaagtagctgataat

SEQ ID NO: 3460 - DNA, 28 bp, Vibrio mediterranei
  Vibrio mediterranei 117-T6
aattactgctgaataagtagctaactaa

SEQ ID NO: 3461 - DNA, 32 bp, Vibrio mediterranei
  Vibrio mediterranei 117-T6
ggtagcaatcaaaccacttcacgacaaactgg

SEQ ID NO: 3462 - DNA, 32 bp, Vibrio mediterranei; identical to SEQ ID NO: 2980
  Vibrio mediterranei 117-T6

SEQ ID NO: 3463 - DNA, 32 bp, Vibrio mediterranei
  Vibrio mediterranei 117-T6
aagcgtaccacgttcatccgtgtacaagagca

SEQ ID NO: 3464 - DNA, 28 bp, Vibrio cholerae
  Vibrio cholerae N2822
gtgaactgccgagtaggtagctgataat

SEQ ID NO: 3465 - DNA, 28 bp, Vibrio cholerae
  Vibrio cholerae N2822
gtgaactgccgagtaggtagctgacaat

SEQ ID NO: 3466 - DNA, 28 bp, Vibrio cholerae
  Vibrio cholerae N2822
gcgaactgctgagtaggcagagcgcatc

SEQ ID NO: 3467 - DNA, 28 bp, Vibrio cholerae
  Vibrio cholerae N2822
tcattactactgcaaagtagctgataac

SEQ ID NO: 3468 - DNA, 28 bp, Vibrio cholerae
  Vibrio cholerae N2822
ctttactgctgaataagtagataactac

SEQ ID NO: 3469 - DNA, 32 bp, Vibrio cholerae; identical to SEQ ID NO: 3016
  Vibrio cholerae N2822

SEQ ID NO: 3470 - DNA, 32 bp, Vibrio cholerae; identical to SEQ ID NO: 3018
  Vibrio cholerae N2822

SEQ ID NO: 3471 - DNA, 32 bp, Vibrio cholerae; identical to SEQ ID NO: 3019
  Vibrio cholerae N2822

SEQ ID NO: 3472 - DNA, 32 bp, Vibrio cholerae
  Vibrio cholerae N2822
aagcgtacaacgtttatccgagttcaagagca

SEQ ID NO: 3473 - DNA, 28 bp, Vibrio parahaemolyticus
  Vibrio parahaemolyticus MAVP-109
gtgaactgccgaataggtagctgataat

SEQ ID NO: 3474 - DNA, 28 bp, Vibrio parahaemolyticus
  Vibrio parahaemolyticus MAVP-109
gtgaactgccgcataggtagagaggatc

SEQ ID NO: 3475 - DNA, 28 bp, Vibrio parahaemolyticus
  Vibrio parahaemolyticus MAVP-109
tcatcactactgaaaagtagctgataac

SEQ ID NO: 3476 - DNA, 28 bp, Vibrio parahaemolyticus
  Vibrio parahaemolyticus MAVP-109
gaatactgccgaacaggtaggaggctca

SEQ ID NO: 3477 - DNA, 31 bp, Vibrio parahaemolyticus; identical to SEQ ID NO: 1876
  Vibrio parahaemolyticus MAVP-109

SEQ ID NO: 3478 - DNA, 31 bp, Vibrio parahaemolyticus; identical to SEQ ID NO: 1877
  Vibrio parahaemolyticus MAVP-109

SEQ ID NO: 3479 - DNA, 31 bp, Vibrio parahaemolyticus; identical to SEQ ID NO: 1878
  Vibrio parahaemolyticus MAVP-109

SEQ ID NO: 3480 - DNA, 28 bp, Vibrio parahaemolyticus
  Vibrio parahaemolyticus CFSAN018753
gtgaactgccgaataggtagctgataat

SEQ ID NO: 3481 - DNA, 28 bp, Vibrio parahaemolyticus
  Vibrio parahaemolyticus CFSAN018753
gtgaactgccgcataggtagagagaatc

SEQ ID NO: 3482 - DNA, 28 bp, Vibrio parahaemolyticus
  Vibrio parahaemolyticus CFSAN018753
tcattactactaaaaagtagctgataac

SEQ ID NO: 3483 - DNA, 28 bp, Vibrio parahaemolyticus
  Vibrio parahaemolyticus CFSAN018753
gaatactgccgaacaggtaggaggctca

SEQ ID NO: 3484 - DNA, 31 bp, Vibrio parahaemolyticus; identical to SEQ ID NO: 1947
  Vibrio parahaemolyticus CFSAN018753

SEQ ID NO: 3485 - DNA, 31 bp, Vibrio parahaemolyticus; identical to SEQ ID NO: 1877
  Vibrio parahaemolyticus CFSAN018753

SEQ ID NO: 3486 - DNA, 31 bp, Vibrio parahaemolyticus; identical to SEQ ID NO: 1878
  Vibrio parahaemolyticus CFSAN018753

SEQ ID NO: 3487 - DNA, 28 bp, Vibrio parahaemolyticus
  Vibrio parahaemolyticus GCSL_R87
gtgaactgccgaataggtagctgataat

SEQ ID NO: 3488 - DNA, 28 bp, Vibrio parahaemolyticus
  Vibrio parahaemolyticus GCSL_R87
atgaactgccgaataggtagagaggagc

SEQ ID NO: 3489 - DNA, 28 bp, Vibrio parahaemolyticus
  Vibrio parahaemolyticus GCSL_R87
tcattactacttaaaagtagctgataac

SEQ ID NO: 3490 - DNA, 28 bp, Vibrio parahaemolyticus
  Vibrio parahaemolyticus GCSL_R87
gaatactgccgaacaggtaggaggctca

SEQ ID NO: 3491 - DNA, 31 bp, Vibrio parahaemolyticus; identical to SEQ ID NO: 1897
  Vibrio parahaemolyticus GCSL_R87

SEQ ID NO: 3492 - DNA, 31 bp, Vibrio parahaemolyticus; identical to SEQ ID NO: 1877
  Vibrio parahaemolyticus GCSL_R87

SEQ ID NO: 3493 - DNA, 31 bp, Vibrio parahaemolyticus; identical to SEQ ID NO: 2038
  Vibrio parahaemolyticus GCSL_R87

SEQ ID NO: 3494 - DNA, 28 bp, Vibrio parahaemolyticus
  Vibrio parahaemolyticus GCSL_R88
gtgaactgccgaataggtagctgataat

SEQ ID NO: 3495 - DNA, 28 bp, Vibrio parahaemolyticus
  Vibrio parahaemolyticus GCSL_R88
atgaactgccgaataggtagagaggagc

SEQ ID NO: 3496 - DNA, 28 bp, Vibrio parahaemolyticus
  Vibrio parahaemolyticus GCSL_R88
tcattactacttaaaagtagctgataac

SEQ ID NO: 3497 - DNA, 28 bp, Vibrio parahaemolyticus
  Vibrio parahaemolyticus GCSL_R88
gaatactgccgaacaggtaggaggctca

SEQ ID NO: 3498 - DNA, 31 bp, Vibrio parahaemolyticus; identical to SEQ ID NO: 1897
  Vibrio parahaemolyticus GCSL_R88

SEQ ID NO: 3499 - DNA, 31 bp, Vibrio parahaemolyticus; identical to SEQ ID NO: 1877
  Vibrio parahaemolyticus GCSL_R88

SEQ ID NO: 3500 - DNA, 31 bp, Vibrio parahaemolyticus; identical to SEQ ID NO: 2038
  Vibrio parahaemolyticus GCSL_R88

SEQ ID NO: 3501 - DNA, 28 bp, Vibrio parahaemolyticus
  Vibrio parahaemolyticus CDC_K4636
gtgaactgccgaataggtagctgataat

SEQ ID NO: 3502 - DNA, 28 bp, Vibrio parahaemolyticus
  Vibrio parahaemolyticus CDC_K4636
gtgaactgccgcataggtagagaggatc

SEQ ID NO: 3503 - DNA, 28 bp, Vibrio parahaemolyticus
  Vibrio parahaemolyticus CDC_K4636
tcatcactactgaaaagtagctgataac

SEQ ID NO: 3504 - DNA, 28 bp, Vibrio parahaemolyticus
  Vibrio parahaemolyticus CDC_K4636
gaatactgccgaacaggtaggaggctca

SEQ ID NO: 3505 - DNA, 31 bp, Vibrio parahaemolyticus; identical to SEQ ID NO: 1876
  Vibrio parahaemolyticus CDC_K4636

SEQ ID NO: 3506 - DNA, 31 bp, Vibrio parahaemolyticus; identical to SEQ ID NO: 1877
  Vibrio parahaemolyticus CDC_K4636

SEQ ID NO: 3507 - DNA, 31 bp, Vibrio parahaemolyticus; identical to SEQ ID NO: 1970
  Vibrio parahaemolyticus CDC_K4636

SEQ ID NO: 3508 - DNA, 28 bp, Vibrio parahaemolyticus
  Vibrio parahaemolyticus CDC_K4637G
gtgaactgccgaataggtagctgataat

SEQ ID NO: 3509 - DNA, 28 bp, Vibrio parahaemolyticus
  Vibrio parahaemolyticus CDC_K4637G
gtgaactgccgcataggtagagagaatc

SEQ ID NO: 3510 - DNA, 28 bp, Vibrio parahaemolyticus
  Vibrio parahaemolyticus CDC_K4637G
tcattactactaaaaagtagctgataac

SEQ ID NO: 3511 - DNA, 28 bp, Vibrio parahaemolyticus
  Vibrio parahaemolyticus CDC_K4637G
gaatactgccgaacaggtaggaggctca

SEQ ID NO: 3512 - DNA, 32 bp, Vibrio parahaemolyticus; identical to SEQ ID NO: 1946
  Vibrio parahaemolyticus CDC_K4637G

SEQ ID NO: 3513 - DNA, 31 bp, Vibrio parahaemolyticus; identical to SEQ ID NO: 1947
  Vibrio parahaemolyticus CDC_K4637G

SEQ ID NO: 3514 - DNA, 31 bp, Vibrio parahaemolyticus; identical to SEQ ID NO: 1877
  Vibrio parahaemolyticus CDC_K4637G

SEQ ID NO: 3515 - DNA, 31 bp, Vibrio parahaemolyticus; identical to SEQ ID NO: 1878
  Vibrio parahaemolyticus CDC_K4637G

SEQ ID NO: 3516 - DNA, 28 bp, Vibrio parahaemolyticus
  Vibrio parahaemolyticus CDC_K5073
gtgaactgccgaataggtagctgataat

SEQ ID NO: 3517 - DNA, 28 bp, Vibrio parahaemolyticus
  Vibrio parahaemolyticus CDC_K5073
atgaactgccgaataggtagagaggagc

SEQ ID NO: 3518 - DNA, 28 bp, Vibrio parahaemolyticus
  Vibrio parahaemolyticus CDC_K5073
tcattactacttaaaagtagctgataac

SEQ ID NO: 3519 - DNA, 28 bp, Vibrio parahaemolyticus
  Vibrio parahaemolyticus CDC_K5073
gaatactgccgaacaggtaggaggctca

SEQ ID NO: 3520 - DNA, 31 bp, Vibrio parahaemolyticus; identical to SEQ ID NO: 1897
  Vibrio parahaemolyticus CDC_K5073

SEQ ID NO: 3521 - DNA, 31 bp, Vibrio parahaemolyticus; identical to SEQ ID NO: 1877
  Vibrio parahaemolyticus CDC_K5073

SEQ ID NO: 3522 - DNA, 31 bp, Vibrio parahaemolyticus; identical to SEQ ID NO: 1970
  Vibrio parahaemolyticus CDC_K5073

SEQ ID NO: 3523 - DNA, 28 bp, Vibrio parahaemolyticus
  Vibrio parahaemolyticus 3259
gtgaactgccgaataggtagctgataat

SEQ ID NO: 3524 - DNA, 28 bp, Vibrio parahaemolyticus
  Vibrio parahaemolyticus 3259
gtgaactgccgcataggtagagagaatc

SEQ ID NO: 3525 - DNA, 28 bp, Vibrio parahaemolyticus
  Vibrio parahaemolyticus 3259
tcattactactaaaaagtagctgataac

SEQ ID NO: 3526 - DNA, 28 bp, Vibrio parahaemolyticus
  Vibrio parahaemolyticus 3259
gaatactgccgaacaggtaggaggctca

SEQ ID NO: 3527 - DNA, 32 bp, Vibrio parahaemolyticus; identical to SEQ ID NO: 2035
  Vibrio parahaemolyticus 3259

SEQ ID NO: 3528 - DNA, 31 bp, Vibrio parahaemolyticus; identical to SEQ ID NO: 1947
  Vibrio parahaemolyticus 3259

SEQ ID NO: 3529 - DNA, 31 bp, Vibrio parahaemolyticus; identical to SEQ ID NO: 1877
  Vibrio parahaemolyticus 3259

SEQ ID NO: 3530 - DNA, 31 bp, Vibrio parahaemolyticus; identical to SEQ ID NO: 1878
  Vibrio parahaemolyticus 3259

SEQ ID NO: 3531 - DNA, 28 bp, Vibrio parahaemolyticus
  Vibrio parahaemolyticus 12310
gtgaactgccgaataggtagctgataat

SEQ ID NO: 3532 - DNA, 28 bp, Vibrio parahaemolyticus
  Vibrio parahaemolyticus 12310
gtgaactgccgcataggtagagaggatc

SEQ ID NO: 3533 - DNA, 28 bp, Vibrio parahaemolyticus
  Vibrio parahaemolyticus 12310
tcatcactactgaaaagtagctgataac

SEQ ID NO: 3534 - DNA, 28 bp, Vibrio parahaemolyticus
  Vibrio parahaemolyticus 12310
gaatactgccgaacaggtaggaggctca

SEQ ID NO: 3535 - DNA, 31 bp, Vibrio parahaemolyticus; identical to SEQ ID NO: 1876
  Vibrio parahaemolyticus 12310

SEQ ID NO: 3536 - DNA, 31 bp, Vibrio parahaemolyticus; identical to SEQ ID NO: 1877
  Vibrio parahaemolyticus 12310

SEQ ID NO: 3537 - DNA, 31 bp, Vibrio parahaemolyticus; identical to SEQ ID NO: 1878
  Vibrio parahaemolyticus 12310

SEQ ID NO: 3538 - DNA, 28 bp, Vibrio parahaemolyticus
  Vibrio parahaemolyticus EKP-008
gtgaactgccgaataggtagctgataat

SEQ ID NO: 3539 - DNA, 28 bp, Vibrio parahaemolyticus
  Vibrio parahaemolyticus EKP-008
gtgaactgccgcataggtagagagaatc

SEQ ID NO: 3540 - DNA, 28 bp, Vibrio parahaemolyticus
  Vibrio parahaemolyticus EKP-008
tcattactactaaaaagtagctgataac

SEQ ID NO: 3541 - DNA, 28 bp, Vibrio parahaemolyticus
  Vibrio parahaemolyticus EKP-008
gaatactgccgaacaggtaggaggctca

SEQ ID NO: 3542 - DNA, 32 bp, Vibrio parahaemolyticus; identical to SEQ ID NO: 2035
  Vibrio parahaemolyticus EKP-008

SEQ ID NO: 3543 - DNA, 31 bp, Vibrio parahaemolyticus; identical to SEQ ID NO: 1947
  Vibrio parahaemolyticus EKP-008

SEQ ID NO: 3544 - DNA, 31 bp, Vibrio parahaemolyticus; identical to SEQ ID NO: 1877
  Vibrio parahaemolyticus EKP-008

SEQ ID NO: 3545 - DNA, 31 bp, Vibrio parahaemolyticus; identical to SEQ ID NO: 1878
  Vibrio parahaemolyticus EKP-008

SEQ ID NO: 3546 - DNA, 28 bp, Vibrio parahaemolyticus
  Vibrio parahaemolyticus CFSAN001612
gtgaactgccgaataggtagctgataat

SEQ ID NO: 3547 - DNA, 28 bp, Vibrio parahaemolyticus
  Vibrio parahaemolyticus CFSAN001612
gtgaactgccgcataggtagagaggatc

SEQ ID NO: 3548 - DNA, 28 bp, Vibrio parahaemolyticus
  Vibrio parahaemolyticus CFSAN001612
tcatcactactgaaaagtagctgataac

SEQ ID NO: 3549 - DNA, 28 bp, Vibrio parahaemolyticus
  Vibrio parahaemolyticus CFSAN001612
gaatactgccgaacaggtaggaggctca

SEQ ID NO: 3550 - DNA, 31 bp, Vibrio parahaemolyticus; identical to SEQ ID NO: 1876
  Vibrio parahaemolyticus CFSAN001612

SEQ ID NO: 3551 - DNA, 31 bp, Vibrio parahaemolyticus; identical to SEQ ID NO: 1877
  Vibrio parahaemolyticus CFSAN001612

SEQ ID NO: 3552 - DNA, 31 bp, Vibrio parahaemolyticus; identical to SEQ ID NO: 1878
  Vibrio parahaemolyticus CFSAN001612

SEQ ID NO: 3553 - DNA, 28 bp, Vibrio fluvialis
  Vibrio fluvialis NCTC11327
gttcaccgccgcataggcagctgataat

SEQ ID NO: 3554 - DNA, 28 bp, Vibrio fluvialis
  Vibrio fluvialis NCTC11327
gttcaccgccgcataggcagatttaact

SEQ ID NO: 3555 - DNA, 28 bp, Vibrio fluvialis
  Vibrio fluvialis NCTC11327
caatactactgcaaaagtagttgataac

SEQ ID NO: 3556 - DNA, 28 bp, Vibrio fluvialis
  Vibrio fluvialis NCTC11327
aggtactactgaataagtagatattgaa

SEQ ID NO: 3557 - DNA, 32 bp, Vibrio fluvialis; identical to SEQ ID NO: 2496
  Vibrio fluvialis NCTC11327

SEQ ID NO: 3558 - DNA, 32 bp, Vibrio fluvialis; identical to SEQ ID NO: 2497
  Vibrio fluvialis NCTC11327

SEQ ID NO: 3559 - DNA, 31 bp, Vibrio fluvialis; identical to SEQ ID NO: 2498
  Vibrio fluvialis NCTC11327

SEQ ID NO: 3560 - DNA, 31 bp, Vibrio fluvialis; identical to SEQ ID NO: 2499
  Vibrio fluvialis NCTC11327

SEQ ID NO: 3561 - DNA, 28 bp, Vibrio parahaemolyticus
  Vibrio parahaemolyticus EKP-028
gtgaactgccgaataggtagctgataat

SEQ ID NO: 3562 - DNA, 28 bp, Vibrio parahaemolyticus
  Vibrio parahaemolyticus EKP-028
gtgaactgccgcataggtagagagaatc

SEQ ID NO: 3563 - DNA, 28 bp, Vibrio parahaemolyticus
  Vibrio parahaemolyticus EKP-028
tcattactactaaaaagtagctgataac

SEQ ID NO: 3564 - DNA, 28 bp, Vibrio parahaemolyticus
  Vibrio parahaemolyticus EKP-028
gaatactgccgaacaggtaggaggctca

SEQ ID NO: 3565 - DNA, 32 bp, Vibrio parahaemolyticus; identical to SEQ ID NO: 1946
  Vibrio parahaemolyticus EKP-028

SEQ ID NO: 3566 - DNA, 31 bp, Vibrio parahaemolyticus; identical to SEQ ID NO: 1947
  Vibrio parahaemolyticus EKP-028

SEQ ID NO: 3567 - DNA, 31 bp, Vibrio parahaemolyticus; identical to SEQ ID NO: 1877
  Vibrio parahaemolyticus EKP-028

SEQ ID NO: 3568 - DNA, 31 bp, Vibrio parahaemolyticus; identical to SEQ ID NO: 1878
  Vibrio parahaemolyticus EKP-028

SEQ ID NO: 3569 - DNA, 28 bp, Vibrio parahaemolyticus
  Vibrio parahaemolyticus EKP-026
gtgaactgccgaataggtagctgataat

SEQ ID NO: 3570 - DNA, 28 bp, Vibrio parahaemolyticus
  Vibrio parahaemolyticus EKP-026
gtgaactgccgcataggtagagagaatc

SEQ ID NO: 3571 - DNA, 28 bp, Vibrio parahaemolyticus
  Vibrio parahaemolyticus EKP-026
tcattactactaaaaagtagctgataac

SEQ ID NO: 3572 - DNA, 28 bp, Vibrio parahaemolyticus
  Vibrio parahaemolyticus EKP-026
gaatactgccgaacaggtaggaggctca

SEQ ID NO: 3573 - DNA, 32 bp, Vibrio parahaemolyticus; identical to SEQ ID NO: 1946
  Vibrio parahaemolyticus EKP-026

SEQ ID NO: 3574 - DNA, 31 bp, Vibrio parahaemolyticus; identical to SEQ ID NO: 1947
  Vibrio parahaemolyticus EKP-026

SEQ ID NO: 3575 - DNA, 31 bp, Vibrio parahaemolyticus; identical to SEQ ID NO: 1877
  Vibrio parahaemolyticus EKP-026

SEQ ID NO: 3576 - DNA, 31 bp, Vibrio parahaemolyticus; identical to SEQ ID NO: 1878
  Vibrio parahaemolyticus EKP-026

SEQ ID NO: 3577 - DNA, 28 bp, Vibrio parahaemolyticus
  Vibrio parahaemolyticus HS-06-05
gtgaactgccgaataggtagctgataat

SEQ ID NO: 3578 - DNA, 28 bp, Vibrio parahaemolyticus
  Vibrio parahaemolyticus HS-06-05
gtgaactgccgcataggtagagaggatc

SEQ ID NO: 3579 - DNA, 28 bp, Vibrio parahaemolyticus
  Vibrio parahaemolyticus HS-06-05
tcattactacttaaaagtagctgataac

SEQ ID NO: 3580 - DNA, 28 bp, Vibrio parahaemolyticus
  Vibrio parahaemolyticus HS-06-05
gaatactgccgaacaggtaggaggctca

SEQ ID NO: 3581 - DNA, 31 bp, Vibrio parahaemolyticus; identical to SEQ ID NO: 1876
  Vibrio parahaemolyticus HS-06-05

SEQ ID NO: 3582 - DNA, 31 bp, Vibrio parahaemolyticus; identical to SEQ ID NO: 1877
  Vibrio parahaemolyticus HS-06-05

SEQ ID NO: 3583 - DNA, 31 bp, Vibrio parahaemolyticus; identical to SEQ ID NO: 1878
  Vibrio parahaemolyticus HS-06-05

SEQ ID NO: 3584 - DNA, 28 bp, Vibrio parahaemolyticus
  Vibrio parahaemolyticus MAVP-112
gtgaactgccgaataggtagctgataat

SEQ ID NO: 3585 - DNA, 28 bp, Vibrio parahaemolyticus
  Vibrio parahaemolyticus MAVP-112
gtgaactgccgcataggtagagaggatc

SEQ ID NO: 3586 - DNA, 28 bp, Vibrio parahaemolyticus
  Vibrio parahaemolyticus MAVP-112
tcatcactactgaaaagtagctgataac

SEQ ID NO: 3587 - DNA, 28 bp, Vibrio parahaemolyticus
  Vibrio parahaemolyticus MAVP-112
gaatactgccgaacaggtaggaggctca

SEQ ID NO: 3588 - DNA, 31 bp, Vibrio parahaemolyticus; identical to SEQ ID NO: 1876
  Vibrio parahaemolyticus MAVP-112

SEQ ID NO: 3589 - DNA, 31 bp, Vibrio parahaemolyticus; identical to SEQ ID NO: 1877
  Vibrio parahaemolyticus MAVP-112

SEQ ID NO: 3590 - DNA, 31 bp, Vibrio parahaemolyticus; identical to SEQ ID NO: 1878
  Vibrio parahaemolyticus MAVP-112

SEQ ID NO: 3591 - DNA, 28 bp, Vibrio parahaemolyticus
  Vibrio parahaemolyticus Vp5
gtgtactgccggataggtagctgataat

SEQ ID NO: 3592 - DNA, 28 bp, Vibrio parahaemolyticus
  Vibrio parahaemolyticus Vp5
gtgtactgccggataggtagaaatatta

SEQ ID NO: 3593 - DNA, 28 bp, Vibrio parahaemolyticus
  Vibrio parahaemolyticus Vp5
tcacaactactggaaagtagctgataac

SEQ ID NO: 3594 - DNA, 28 bp, Vibrio parahaemolyticus
  Vibrio parahaemolyticus Vp5
gactactgccgagcaggtaggtggtttg

SEQ ID NO: 3595 - DNA, 32 bp, Vibrio parahaemolyticus
  Vibrio parahaemolyticus Vp5
agcatagtcacaacagtctgcactctccctgt

SEQ ID NO: 3596 - DNA, 31 bp, Vibrio parahaemolyticus
  Vibrio parahaemolyticus Vp5
aaatttacatctctaggctctgccaaaaagc

SEQ ID NO: 3597 - DNA, 31 bp, Vibrio parahaemolyticus; identical to SEQ ID NO: 1878
  Vibrio parahaemolyticus Vp5

SEQ ID NO: 3598 - DNA, 28 bp, Vibrio alginolyticus
  Vibrio alginolyticus V1
gtgaactaccgaataggtagctgataat

SEQ ID NO: 3599 - DNA, 28 bp, Vibrio alginolyticus
  Vibrio alginolyticus V1
gtgaactgccgcataggtagagaggagt

SEQ ID NO: 3600 - DNA, 28 bp, Vibrio alginolyticus
  Vibrio alginolyticus V1
tcatcactactgaaaagtagctgataac

SEQ ID NO: 3601 - DNA, 28 bp, Vibrio alginolyticus
  Vibrio alginolyticus V1
gaatactgccgaacaggtaggaggctcc

SEQ ID NO: 3602 - DNA, 32 bp, Vibrio alginolyticus
  Vibrio alginolyticus V1
tttgcgcaaatttatagtcacctgggaaagta

SEQ ID NO: 3603 - DNA, 31 bp, Vibrio alginolyticus; identical to SEQ ID NO: 1877
  Vibrio alginolyticus V1

SEQ ID NO: 3604 - DNA, 31 bp, Vibrio alginolyticus
  Vibrio alginolyticus V1
aaatttacgtcgctgggttctgctaaaaagc

SEQ ID NO: 3605 - DNA, 28 bp, Vibrio parahaemolyticus
  Vibrio parahaemolyticus CT4287
gtgaactgccgaataggtagctgataat

SEQ ID NO: 3606 - DNA, 28 bp, Vibrio parahaemolyticus
  Vibrio parahaemolyticus CT4287
atgaactgccgaataggtagagaggagc

SEQ ID NO: 3607 - DNA, 28 bp, Vibrio parahaemolyticus
  Vibrio parahaemolyticus CT4287
tcattactacttaaaagtagctgataac

SEQ ID NO: 3608 - DNA, 28 bp, Vibrio parahaemolyticus
  Vibrio parahaemolyticus CT4287
gaatactgccgaacaggtaggaggctca

SEQ ID NO: 3609 - DNA, 31 bp, Vibrio parahaemolyticus; identical to SEQ ID NO: 1897
  Vibrio parahaemolyticus CT4287

SEQ ID NO: 3610 - DNA, 31 bp, Vibrio parahaemolyticus; identical to SEQ ID NO: 1877
  Vibrio parahaemolyticus CT4287

SEQ ID NO: 3611 - DNA, 31 bp, Vibrio parahaemolyticus; identical to SEQ ID NO: 1970
  Vibrio parahaemolyticus CT4287

SEQ ID NO: 3612 - DNA, 28 bp, Vibrio anguillarum
  Vibrio anguillarum JLL237
gtgaactgccgagtaggcagctgataat

SEQ ID NO: 3613 - DNA, 28 bp, Vibrio anguillarum
  Vibrio anguillarum JLL237
gtgaactgccgagtaggcagagtgcatc

SEQ ID NO: 3614 - DNA, 28 bp, Vibrio anguillarum
  Vibrio anguillarum JLL237
ccacactgctgcaaagtagttgataaca

SEQ ID NO: 3615 - DNA, 28 bp, Vibrio anguillarum
  Vibrio anguillarum JLL237
ctttactgctgaataagtagctaactac

SEQ ID NO: 3616 - DNA, 32 bp, Vibrio anguillarum; identical to SEQ ID NO: 3255
  Vibrio anguillarum JLL237

SEQ ID NO: 3617 - DNA, 31 bp, Vibrio anguillarum; identical to SEQ ID NO: 3256
  Vibrio anguillarum JLL237

SEQ ID NO: 3618 - DNA, 31 bp, Vibrio anguillarum; identical to SEQ ID NO: 3257
  Vibrio anguillarum JLL237

SEQ ID NO: 3619 - DNA, 28 bp, Vibrio parahaemolyticus
  Vibrio parahaemolyticus VP170801
gtgaactgccgaataggtagctgataat

SEQ ID NO: 3620 - DNA, 28 bp, Vibrio parahaemolyticus
  Vibrio parahaemolyticus VP170801
gtgaactgccgcataggtagagagaatc

SEQ ID NO: 3621 - DNA, 28 bp, Vibrio parahaemolyticus
  Vibrio parahaemolyticus VP170801
tcattactactaaaaagtagctgataac

SEQ ID NO: 3622 - DNA, 28 bp, Vibrio parahaemolyticus
  Vibrio parahaemolyticus VP170801
gaatactgccgaacaggtaggaggctca

SEQ ID NO: 3623 - DNA, 32 bp, Vibrio parahaemolyticus; identical to SEQ ID NO: 2035
  Vibrio parahaemolyticus VP170801

SEQ ID NO: 3624 - DNA, 31 bp, Vibrio parahaemolyticus; identical to SEQ ID NO: 1947
  Vibrio parahaemolyticus VP170801

SEQ ID NO: 3625 - DNA, 31 bp, Vibrio parahaemolyticus; identical to SEQ ID NO: 1877
  Vibrio parahaemolyticus VP170801

SEQ ID NO: 3626 - DNA, 31 bp, Vibrio parahaemolyticus; identical to SEQ ID NO: 1878
  Vibrio parahaemolyticus VP170801

SEQ ID NO: 3627 - DNA, 28 bp, Vibrio parahaemolyticus
  Vibrio parahaemolyticus Gxw_9143
gtgaactgccgaataggtagctgataat

SEQ ID NO: 3628 - DNA, 28 bp, Vibrio parahaemolyticus
  Vibrio parahaemolyticus Gxw_9143
gtgaactgccgcataggtagagagaatc

SEQ ID NO: 3629 - DNA, 28 bp, Vibrio parahaemolyticus
  Vibrio parahaemolyticus Gxw_9143
tcattactactaaaaagtagctgataac

SEQ ID NO: 3630 - DNA, 28 bp, Vibrio parahaemolyticus
  Vibrio parahaemolyticus Gxw_9143
gaatactgccgaacaggtaggaggctca

SEQ ID NO: 3631 - DNA, 32 bp, Vibrio parahaemolyticus; identical to SEQ ID NO: 2035
  Vibrio parahaemolyticus Gxw_9143

SEQ ID NO: 3632 - DNA, 31 bp, Vibrio parahaemolyticus; identical to SEQ ID NO: 1947
  Vibrio parahaemolyticus Gxw_9143

SEQ ID NO: 3633 - DNA, 31 bp, Vibrio parahaemolyticus; identical to SEQ ID NO: 1877
  Vibrio parahaemolyticus Gxw_9143

SEQ ID NO: 3634 - DNA, 31 bp, Vibrio parahaemolyticus; identical to SEQ ID NO: 1878
  Vibrio parahaemolyticus Gxw_9143

SEQ ID NO: 3635 - DNA, 28 bp, Vibrio parahaemolyticus
  Vibrio parahaemolyticus CFSAN018752
gtgaactgccgaataggtagctgataat

SEQ ID NO: 3636 - DNA, 28 bp, Vibrio parahaemolyticus
  Vibrio parahaemolyticus CFSAN018752
gtgaactgccgcataggtagagagaatc

SEQ ID NO: 3637 - DNA, 28 bp, Vibrio parahaemolyticus
  Vibrio parahaemolyticus CFSAN018752
tcattactactaaaaagtagctgataac

SEQ ID NO: 3638 - DNA, 28 bp, Vibrio parahaemolyticus
  Vibrio parahaemolyticus CFSAN018752
gaatactgccgaacaggtaggaggctca

SEQ ID NO: 3639 - DNA, 31 bp, Vibrio parahaemolyticus; identical to SEQ ID NO: 1947
  Vibrio parahaemolyticus CFSAN018752

SEQ ID NO: 3640 - DNA, 31 bp, Vibrio parahaemolyticus; identical to SEQ ID NO: 1877
  Vibrio parahaemolyticus CFSAN018752

SEQ ID NO: 3641 - DNA, 31 bp, Vibrio parahaemolyticus; identical to SEQ ID NO: 1878
  Vibrio parahaemolyticus CFSAN018752

SEQ ID NO: 3642 - DNA, 28 bp, Vibrio owensii
  Vibrio owensii 1700302
gtgtactgccgaataggtagctgataat

SEQ ID NO: 3643 - DNA, 28 bp, Vibrio owensii
  Vibrio owensii 1700302
gcgtactgccgaataggtaggacacctt

SEQ ID NO: 3644 - DNA, 28 bp, Vibrio owensii
  Vibrio owensii 1700302
tcattactactgagaagtagctgataat

SEQ ID NO: 3645 - DNA, 28 bp, Vibrio owensii
  Vibrio owensii 1700302
attcactgctgaataagtagatacttta

SEQ ID NO: 3646 - DNA, 32 bp, Vibrio owensii
  Vibrio owensii 1700302
tatggcgttggtgctgctaaacttcctccaca

SEQ ID NO: 3647 - DNA, 32 bp, Vibrio owensii
  Vibrio owensii 1700302
aaacgaaccactttcattcgagttcaagagca

SEQ ID NO: 3648 - DNA, 32 bp, Vibrio owensii
  Vibrio owensii 1700302
aagcgtacaacgttcatccgcgtacaagagca

SEQ ID NO: 3649 - DNA, 28 bp, Photobacterium piscicola
  Photobacterium piscicola type strain: NCCB 100098
gtgtactgccgagtaggcagctgataac

SEQ ID NO: 3650 - DNA, 28 bp, Photobacterium piscicola
  Photobacterium piscicola type strain: NCCB 100098
gtgtactgccgaataggtagatacattt

SEQ ID NO: 3651 - DNA, 28 bp, Photobacterium piscicola
  Photobacterium piscicola type strain: NCCB 100098
ccattactactgaaaagtagctgataaa

SEQ ID NO: 3652 - DNA, 28 bp, Photobacterium piscicola
  Photobacterium piscicola type strain: NCCB 100098
atatactgctgaataagtagataattaa

SEQ ID NO: 3653 - DNA, 32 bp, Photobacterium piscicola; identical to SEQ ID NO: 2249
  Photobacterium piscicola type strain: NCCB 100098

SEQ ID NO: 3654 - DNA, 32 bp, Photobacterium piscicola; identical to SEQ ID NO: 2250
  Photobacterium piscicola type strain: NCCB 100098

SEQ ID NO: 3655 - DNA, 32 bp, Photobacterium piscicola; identical to SEQ ID NO: 2251
  Photobacterium piscicola type strain: NCCB 100098

SEQ ID NO: 3656 - DNA, 32 bp, Photobacterium piscicola
  Photobacterium piscicola type strain: NCCB 100098
aagcgtgcaacgtttatccgcgttcaagaaca

SEQ ID NO: 3657 - DNA, 28 bp, Vibrio parahaemolyticus
  Vibrio parahaemolyticus CFSAN025055
gtgaactgccgaataggtagctgataat

SEQ ID NO: 3658 - DNA, 28 bp, Vibrio parahaemolyticus
  Vibrio parahaemolyticus CFSAN025055
gtgaactgccgcataggtagagagaatc

SEQ ID NO: 3659 - DNA, 28 bp, Vibrio parahaemolyticus
  Vibrio parahaemolyticus CFSAN025055
tcattactactaaaaagtagctgataac

SEQ ID NO: 3660 - DNA, 28 bp, Vibrio parahaemolyticus
  Vibrio parahaemolyticus CFSAN025055
gaatactgccgaacaggtaggaggctca

SEQ ID NO: 3661 - DNA, 32 bp, Vibrio parahaemolyticus; identical to SEQ ID NO: 2034
  Vibrio parahaemolyticus CFSAN025055

SEQ ID NO: 3662 - DNA, 32 bp, Vibrio parahaemolyticus; identical to SEQ ID NO: 2035
  Vibrio parahaemolyticus CFSAN025055

SEQ ID NO: 3663 - DNA, 31 bp, Vibrio parahaemolyticus; identical to SEQ ID NO: 1947
  Vibrio parahaemolyticus CFSAN025055

SEQ ID NO: 3664 - DNA, 31 bp, Vibrio parahaemolyticus; identical to SEQ ID NO: 1877
  Vibrio parahaemolyticus CFSAN025055

SEQ ID NO: 3665 - DNA, 31 bp, Vibrio parahaemolyticus; identical to SEQ ID NO: 2038
  Vibrio parahaemolyticus CFSAN025055

SEQ ID NO: 3666 - DNA, 28 bp, Vibrio parahaemolyticus
  Vibrio parahaemolyticus GCSL_R137
gtgaactgccgaataggtagctgataat

SEQ ID NO: 3667 - DNA, 28 bp, Vibrio parahaemolyticus
  Vibrio parahaemolyticus GCSL_R137
atgaactgccgaataggtagagaggagc

SEQ ID NO: 3668 - DNA, 28 bp, Vibrio parahaemolyticus
  Vibrio parahaemolyticus GCSL_R137
tcattactacttaaaagtagctgataac

SEQ ID NO: 3669 - DNA, 28 bp, Vibrio parahaemolyticus
  Vibrio parahaemolyticus GCSL_R137
gaatactgccgaacaggtaggaggctca

SEQ ID NO: 3670 - DNA, 31 bp, Vibrio parahaemolyticus; identical to SEQ ID NO: 1897
  Vibrio parahaemolyticus GCSL_R137

SEQ ID NO: 3671 - DNA, 31 bp, Vibrio parahaemolyticus; identical to SEQ ID NO: 1877
  Vibrio parahaemolyticus GCSL_R137

SEQ ID NO: 3672 - DNA, 31 bp, Vibrio parahaemolyticus; identical to SEQ ID NO: 1970
  Vibrio parahaemolyticus GCSL_R137

SEQ ID NO: 3673 - DNA, 28 bp, Vibrio parahaemolyticus
  Vibrio parahaemolyticus CFSAN001621
gtgaactgccgaataggtagctgataat

SEQ ID NO: 3674 - DNA, 28 bp, Vibrio parahaemolyticus
  Vibrio parahaemolyticus CFSAN001621
gtgaactgccgcataggtagagaggatc

SEQ ID NO: 3675 - DNA, 28 bp, Vibrio parahaemolyticus
  Vibrio parahaemolyticus CFSAN001621
tcatcactactgaaaagtagctgataac

SEQ ID NO: 3676 - DNA, 28 bp, Vibrio parahaemolyticus
  Vibrio parahaemolyticus CFSAN001621
gaatactgccgaacaggtaggaggctca

SEQ ID NO: 3677 - DNA, 31 bp, Vibrio parahaemolyticus; identical to SEQ ID NO: 1876
  Vibrio parahaemolyticus CFSAN001621

SEQ ID NO: 3678 - DNA, 31 bp, Vibrio parahaemolyticus; identical to SEQ ID NO: 1877
  Vibrio parahaemolyticus CFSAN001621

SEQ ID NO: 3679 - DNA, 31 bp, Vibrio parahaemolyticus; identical to SEQ ID NO: 1878
  Vibrio parahaemolyticus CFSAN001621

SEQ ID NO: 3680 - DNA, 28 bp, Vibrio parahaemolyticus
  Vibrio parahaemolyticus AN-5034
gtgaactgccgaataggtagctgataat

SEQ ID NO: 3681 - DNA, 28 bp, Vibrio parahaemolyticus
  Vibrio parahaemolyticus AN-5034
gtgaactgccgcataggtagagagaatc

SEQ ID NO: 3682 - DNA, 28 bp, Vibrio parahaemolyticus
  Vibrio parahaemolyticus AN-5034
tcattactactaaaaagtagctgataac

SEQ ID NO: 3683 - DNA, 28 bp, Vibrio parahaemolyticus
  Vibrio parahaemolyticus AN-5034
gaatactgccgaacaggtaggaggctca

SEQ ID NO: 3684 - DNA, 32 bp, Vibrio parahaemolyticus; identical to SEQ ID NO: 1946
  Vibrio parahaemolyticus AN-5034

SEQ ID NO: 3685 - DNA, 31 bp, Vibrio parahaemolyticus; identical to SEQ ID NO: 1947
  Vibrio parahaemolyticus AN-5034

SEQ ID NO: 3686 - DNA, 31 bp, Vibrio parahaemolyticus; identical to SEQ ID NO: 1877
  Vibrio parahaemolyticus AN-5034

SEQ ID NO: 3687 - DNA, 31 bp, Vibrio parahaemolyticus; identical to SEQ ID NO: 1878
  Vibrio parahaemolyticus AN-5034

SEQ ID NO: 3688 - DNA, 28 bp, Vibrio parahaemolyticus
  Vibrio parahaemolyticus CFSAN006130
gtgaactgccgaataggtagctgataat

SEQ ID NO: 3689 - DNA, 28 bp, Vibrio parahaemolyticus
  Vibrio parahaemolyticus CFSAN006130
gtgaactgccgcataggtagagaggatc

SEQ ID NO: 3690 - DNA, 28 bp, Vibrio parahaemolyticus
  Vibrio parahaemolyticus CFSAN006130
tcatcactactgaaaagtagctgataac

SEQ ID NO: 3691 - DNA, 28 bp, Vibrio parahaemolyticus
  Vibrio parahaemolyticus CFSAN006130
gaatactgccgaacaggtaggaggctca

SEQ ID NO: 3692 - DNA, 31 bp, Vibrio parahaemolyticus; identical to SEQ ID NO: 1876
  Vibrio parahaemolyticus CFSAN006130

SEQ ID NO: 3693 - DNA, 31 bp, Vibrio parahaemolyticus; identical to SEQ ID NO: 1877
  Vibrio parahaemolyticus CFSAN006130

SEQ ID NO: 3694 - DNA, 31 bp, Vibrio parahaemolyticus; identical to SEQ ID NO: 1878
  Vibrio parahaemolyticus CFSAN006130

SEQ ID NO: 3695 - DNA, 28 bp, Vibrio parahaemolyticus
  Vibrio parahaemolyticus CFSAN007461
gtgaactgccgaataggtagctgataat

SEQ ID NO: 3696 - DNA, 28 bp, Vibrio parahaemolyticus
  Vibrio parahaemolyticus CFSAN007461
gtgaactgccgcataggtagagaggatc

SEQ ID NO: 3697 - DNA, 28 bp, Vibrio parahaemolyticus
  Vibrio parahaemolyticus CFSAN007461
tcatcactactgaaaagtagctgataac

SEQ ID NO: 3698 - DNA, 28 bp, Vibrio parahaemolyticus
  Vibrio parahaemolyticus CFSAN007461
gaatactgccgaacaggtaggaggctca

SEQ ID NO: 3699 - DNA, 31 bp, Vibrio parahaemolyticus; identical to SEQ ID NO: 1876
  Vibrio parahaemolyticus CFSAN007461

SEQ ID NO: 3700 - DNA, 31 bp, Vibrio parahaemolyticus; identical to SEQ ID NO: 1877
  Vibrio parahaemolyticus CFSAN007461

SEQ ID NO: 3701 - DNA, 31 bp, Vibrio parahaemolyticus; identical to SEQ ID NO: 1878
  Vibrio parahaemolyticus CFSAN007461

SEQ ID NO: 3702 - DNA, 28 bp, Vibrio parahaemolyticus
  Vibrio parahaemolyticus CFSAN007442
gtgaactgccgaataggtagctgataat

SEQ ID NO: 3703 - DNA, 28 bp, Vibrio parahaemolyticus
  Vibrio parahaemolyticus CFSAN007442
atgaactgccgaataggtagagaggagc

SEQ ID NO: 3704 - DNA, 28 bp, Vibrio parahaemolyticus
  Vibrio parahaemolyticus CFSAN007442
tcattactacttaaaagtagctgataac

SEQ ID NO: 3705 - DNA, 28 bp, Vibrio parahaemolyticus
  Vibrio parahaemolyticus CFSAN007442
gaatactgccgaacaggtaggaggctca

SEQ ID NO: 3706 - DNA, 31 bp, Vibrio parahaemolyticus; identical to SEQ ID NO: 1897
  Vibrio parahaemolyticus CFSAN007442

SEQ ID NO: 3707 - DNA, 31 bp, Vibrio parahaemolyticus; identical to SEQ ID NO: 1877
  Vibrio parahaemolyticus CFSAN007442

SEQ ID NO: 3708 - DNA, 31 bp, Vibrio parahaemolyticus; identical to SEQ ID NO: 1878
  Vibrio parahaemolyticus CFSAN007442

SEQ ID NO: 3709 - DNA, 28 bp, Vibrio parahaemolyticus
  Vibrio parahaemolyticus CFSAN007431
gtgaactgccgaataggtagctgataat

SEQ ID NO: 3710 - DNA, 28 bp, Vibrio parahaemolyticus
  Vibrio parahaemolyticus CFSAN007431
gtgaactgccgcataggtagagaggatc

SEQ ID NO: 3711 - DNA, 28 bp, Vibrio parahaemolyticus
  Vibrio parahaemolyticus CFSAN007431
tcatcactactgaaaagtagctgataac

SEQ ID NO: 3712 - DNA, 28 bp, Vibrio parahaemolyticus
  Vibrio parahaemolyticus CFSAN007431
gaatactgccgaacaggtaggaggctca

SEQ ID NO: 3713 - DNA, 31 bp, Vibrio parahaemolyticus; identical to SEQ ID NO: 1876
  Vibrio parahaemolyticus CFSAN007431

SEQ ID NO: 3714 - DNA, 31 bp, Vibrio parahaemolyticus; identical to SEQ ID NO: 1877
  Vibrio parahaemolyticus CFSAN007431

SEQ ID NO: 3715 - DNA, 31 bp, Vibrio parahaemolyticus; identical to SEQ ID NO: 1878
  Vibrio parahaemolyticus CFSAN007431

SEQ ID NO: 3716 - DNA, 28 bp, Vibrio parahaemolyticus
  Vibrio parahaemolyticus CFSAN007434
gtgaactgccgaataggtagctgataat

SEQ ID NO: 3717 - DNA, 28 bp, Vibrio parahaemolyticus
  Vibrio parahaemolyticus CFSAN007434
gtgaactgccgcataggtagagaggatc

SEQ ID NO: 3718 - DNA, 28 bp, Vibrio parahaemolyticus
  Vibrio parahaemolyticus CFSAN007434
tcatcactactgaaaagtagctgataac

SEQ ID NO: 3719 - DNA, 28 bp, Vibrio parahaemolyticus
  Vibrio parahaemolyticus CFSAN007434
gaatactgccgaacaggtaggaggctca

SEQ ID NO: 3720 - DNA, 31 bp, Vibrio parahaemolyticus; identical to SEQ ID NO: 1876
  Vibrio parahaemolyticus CFSAN007434

SEQ ID NO: 3721 - DNA, 31 bp, Vibrio parahaemolyticus; identical to SEQ ID NO: 1877
  Vibrio parahaemolyticus CFSAN007434

SEQ ID NO: 3722 - DNA, 31 bp, Vibrio parahaemolyticus; identical to SEQ ID NO: 1878
  Vibrio parahaemolyticus CFSAN007434

SEQ ID NO: 3723 - DNA, 28 bp, Vibrio parahaemolyticus
  Vibrio parahaemolyticus CFSAN001618
gtgaactgccgaataggtagctgataat

SEQ ID NO: 3724 - DNA, 28 bp, Vibrio parahaemolyticus
  Vibrio parahaemolyticus CFSAN001618
gtgaactgccgcataggtagagaggatc

SEQ ID NO: 3725 - DNA, 28 bp, Vibrio parahaemolyticus
  Vibrio parahaemolyticus CFSAN001618
tcatcactactgaaaagtagctgataac

SEQ ID NO: 3726 - DNA, 28 bp, Vibrio parahaemolyticus
  Vibrio parahaemolyticus CFSAN001618
gaatactgccgaacaggtaggaggctca

SEQ ID NO: 3727 - DNA, 31 bp, Vibrio parahaemolyticus; identical to SEQ ID NO: 1876
  Vibrio parahaemolyticus CFSAN001618

SEQ ID NO: 3728 - DNA, 31 bp, Vibrio parahaemolyticus; identical to SEQ ID NO: 1877
  Vibrio parahaemolyticus CFSAN001618

SEQ ID NO: 3729 - DNA, 31 bp, Vibrio parahaemolyticus; identical to SEQ ID NO: 1878
  Vibrio parahaemolyticus CFSAN001618

SEQ ID NO: 3730 - DNA, 28 bp, Vibrio parahaemolyticus
  Vibrio parahaemolyticus K1203
gtgaactgccgaataggtagctgataat

SEQ ID NO: 3731 - DNA, 28 bp, Vibrio parahaemolyticus
  Vibrio parahaemolyticus K1203
gtgaactgccgcataggtagagaggatc

SEQ ID NO: 3732 - DNA, 28 bp, Vibrio parahaemolyticus
  Vibrio parahaemolyticus K1203
tcatcactactgaaaagtagctgataac

SEQ ID NO: 3733 - DNA, 28 bp, Vibrio parahaemolyticus
  Vibrio parahaemolyticus K1203
gaatactgccgaacaggtaggaggctca

SEQ ID NO: 3734 - DNA, 31 bp, Vibrio parahaemolyticus; identical to SEQ ID NO: 1876
  Vibrio parahaemolyticus K1203

SEQ ID NO: 3735 - DNA, 31 bp, Vibrio parahaemolyticus; identical to SEQ ID NO: 1877
  Vibrio parahaemolyticus K1203

SEQ ID NO: 3736 - DNA, 31 bp, Vibrio parahaemolyticus; identical to SEQ ID NO: 1878
  Vibrio parahaemolyticus K1203

SEQ ID NO: 3737 - DNA, 28 bp, Vibrio parahaemolyticus
  Vibrio parahaemolyticus CFSAN007450
gtgaactgccgaataggtagctgataat

SEQ ID NO: 3738 - DNA, 28 bp, Vibrio parahaemolyticus
  Vibrio parahaemolyticus CFSAN007450
gtgaactgccgcataggtagagagaatc

SEQ ID NO: 3739 - DNA, 28 bp, Vibrio parahaemolyticus
  Vibrio parahaemolyticus CFSAN007450
tcattactactaaaaagtagctgataac

SEQ ID NO: 3740 - DNA, 28 bp, Vibrio parahaemolyticus
  Vibrio parahaemolyticus CFSAN007450
gaatactgccgaacaggtaggaggctca

SEQ ID NO: 3741 - DNA, 32 bp, Vibrio parahaemolyticus; identical to SEQ ID NO: 1946
  Vibrio parahaemolyticus CFSAN007450

SEQ ID NO: 3742 - DNA, 31 bp, Vibrio parahaemolyticus; identical to SEQ ID NO: 1947
  Vibrio parahaemolyticus CFSAN007450

SEQ ID NO: 3743 - DNA, 31 bp, Vibrio parahaemolyticus; identical to SEQ ID NO: 1877
  Vibrio parahaemolyticus CFSAN007450

SEQ ID NO: 3744 - DNA, 31 bp, Vibrio parahaemolyticus; identical to SEQ ID NO: 1878
  Vibrio parahaemolyticus CFSAN007450

SEQ ID NO: 3745 - DNA, 28 bp, Vibrio parahaemolyticus
  Vibrio parahaemolyticus CFSAN006133
gtgaactgccgaataggtagctgataat

SEQ ID NO: 3746 - DNA, 28 bp, Vibrio parahaemolyticus
  Vibrio parahaemolyticus CFSAN006133
gtgaactgccgcataggtagagaggatc

SEQ ID NO: 3747 - DNA, 28 bp, Vibrio parahaemolyticus
  Vibrio parahaemolyticus CFSAN006133
tcatcactactgaaaagtagctgataac

SEQ ID NO: 3748 - DNA, 28 bp, Vibrio parahaemolyticus
  Vibrio parahaemolyticus CFSAN006133
gaatactgccgaacaggtaggaggctca

SEQ ID NO: 3749 - DNA, 31 bp, Vibrio parahaemolyticus; identical to SEQ ID NO: 1876
  Vibrio parahaemolyticus CFSAN006133

SEQ ID NO: 3750 - DNA, 31 bp, Vibrio parahaemolyticus; identical to SEQ ID NO: 1877
  Vibrio parahaemolyticus CFSAN006133

SEQ ID NO: 3751 - DNA, 31 bp, Vibrio parahaemolyticus; identical to SEQ ID NO: 1878
  Vibrio parahaemolyticus CFSAN006133

SEQ ID NO: 3752 - DNA, 28 bp, Vibrio parahaemolyticus
  Vibrio parahaemolyticus 97-10290
gtgaactgccgaataggtagctgataat

SEQ ID NO: 3753 - DNA, 28 bp, Vibrio parahaemolyticus
  Vibrio parahaemolyticus 97-10290
gtgaactgccgcataggtagagaggatc

SEQ ID NO: 3754 - DNA, 28 bp, Vibrio parahaemolyticus
  Vibrio parahaemolyticus 97-10290
tcatcactactgaaaagtagctgataac

SEQ ID NO: 3755 - DNA, 28 bp, Vibrio parahaemolyticus
  Vibrio parahaemolyticus 97-10290
gaatactgccgaacaggtaggaggctca

SEQ ID NO: 3756 - DNA, 31 bp, Vibrio parahaemolyticus; identical to SEQ ID NO: 1876
  Vibrio parahaemolyticus 97-10290

SEQ ID NO: 3757 - DNA, 31 bp, Vibrio parahaemolyticus; identical to SEQ ID NO: 1877
  Vibrio parahaemolyticus 97-10290

SEQ ID NO: 3758 - DNA, 31 bp, Vibrio parahaemolyticus; identical to SEQ ID NO: 1878
  Vibrio parahaemolyticus 97-10290

SEQ ID NO: 3759 - DNA, 28 bp, Vibrio parahaemolyticus
  Vibrio parahaemolyticus 3324
gtgaactgccgaataggtagctgataat

SEQ ID NO: 3760 - DNA, 28 bp, Vibrio parahaemolyticus
  Vibrio parahaemolyticus 3324
gtgaactgccgcataggtagagaggatc

SEQ ID NO: 3761 - DNA, 28 bp, Vibrio parahaemolyticus
  Vibrio parahaemolyticus 3324
tcatcactactgaaaagtagctgataac

SEQ ID NO: 3762 - DNA, 28 bp, Vibrio parahaemolyticus
  Vibrio parahaemolyticus 3324
gaatactgccgaacaggtaggaggctca

SEQ ID NO: 3763 - DNA, 31 bp, Vibrio parahaemolyticus; identical to SEQ ID NO: 1876
  Vibrio parahaemolyticus 3324

SEQ ID NO: 3764 - DNA, 31 bp, Vibrio parahaemolyticus; identical to SEQ ID NO: 1877
  Vibrio parahaemolyticus 3324

SEQ ID NO: 3765 - DNA, 31 bp, Vibrio parahaemolyticus; identical to SEQ ID NO: 1878
  Vibrio parahaemolyticus 3324

SEQ ID NO: 3766 - DNA, 28 bp, Vibrio parahaemolyticus
  Vibrio parahaemolyticus EN2910
gtgaactgccgaataggtagctgataat

SEQ ID NO: 3767 - DNA, 28 bp, Vibrio parahaemolyticus
  Vibrio parahaemolyticus EN2910
gtgaactgccgcataggtagagaggatc

SEQ ID NO: 3768 - DNA, 28 bp, Vibrio parahaemolyticus
  Vibrio parahaemolyticus EN2910
tcatcactactgaaaagtagctgataac

SEQ ID NO: 3769 - DNA, 28 bp, Vibrio parahaemolyticus
  Vibrio parahaemolyticus EN2910
gaatactgccgaacaggtaggaggctca

SEQ ID NO: 3770 - DNA, 31 bp, Vibrio parahaemolyticus; identical to SEQ ID NO: 1876
  Vibrio parahaemolyticus EN2910

SEQ ID NO: 3771 - DNA, 31 bp, Vibrio parahaemolyticus; identical to SEQ ID NO: 1877
  Vibrio parahaemolyticus EN2910

SEQ ID NO: 3772 - DNA, 31 bp, Vibrio parahaemolyticus; identical to SEQ ID NO: 1878
  Vibrio parahaemolyticus EN2910

SEQ ID NO: 3773 - DNA, 28 bp, Vibrio parahaemolyticus
  Vibrio parahaemolyticus 3644
gtgaactgccgaataggtagctgataat

SEQ ID NO: 3774 - DNA, 28 bp, Vibrio parahaemolyticus
  Vibrio parahaemolyticus 3644
gtgaactgccgcataggtagagaggatc

SEQ ID NO: 3775 - DNA, 28 bp, Vibrio parahaemolyticus
  Vibrio parahaemolyticus 3644
tcatcactactgaaaagtagctgataac

SEQ ID NO: 3776 - DNA, 28 bp, Vibrio parahaemolyticus
  Vibrio parahaemolyticus 3644
gaatactgccgaacaggtaggaggctca

SEQ ID NO: 3777 - DNA, 31 bp, Vibrio parahaemolyticus; identical to SEQ ID NO: 1876
  Vibrio parahaemolyticus 3644

SEQ ID NO: 3778 - DNA, 31 bp, Vibrio parahaemolyticus; identical to SEQ ID NO: 1877
  Vibrio parahaemolyticus 3644

SEQ ID NO: 3779 - DNA, 31 bp, Vibrio parahaemolyticus; identical to SEQ ID NO: 1970
  Vibrio parahaemolyticus 3644

SEQ ID NO: 3780 - DNA, 28 bp, Vibrio parahaemolyticus
  Vibrio parahaemolyticus 874301
gtgaactgccgaataggtagctgataat

SEQ ID NO: 3781 - DNA, 28 bp, Vibrio parahaemolyticus
  Vibrio parahaemolyticus 874301
gtgaactgccgcataggtagagaggatc

SEQ ID NO: 3782 - DNA, 28 bp, Vibrio parahaemolyticus
  Vibrio parahaemolyticus 874301
tcatcactactgaaaagtagctgataac

SEQ ID NO: 3783 - DNA, 28 bp, Vibrio parahaemolyticus
  Vibrio parahaemolyticus 874301
gaatactgccgaacaggtaggaggctca

SEQ ID NO: 3784 - DNA, 31 bp, Vibrio parahaemolyticus; identical to SEQ ID NO: 1876
  Vibrio parahaemolyticus 874301

SEQ ID NO: 3785 - DNA, 31 bp, Vibrio parahaemolyticus; identical to SEQ ID NO: 1877
  Vibrio parahaemolyticus 874301

SEQ ID NO: 3786 - DNA, 31 bp, Vibrio parahaemolyticus; identical to SEQ ID NO: 1878
  Vibrio parahaemolyticus 874301

SEQ ID NO: 3787 - DNA, 28 bp, Vibrio parahaemolyticus
  Vibrio parahaemolyticus 857865
gtgaactgccgaataggtagctgataat

SEQ ID NO: 3788 - DNA, 28 bp, Vibrio parahaemolyticus
  Vibrio parahaemolyticus 857865
gtgaactgccgcataggtagagaggatc

SEQ ID NO: 3789 - DNA, 28 bp, Vibrio parahaemolyticus
  Vibrio parahaemolyticus 857865
tcatcactactgaaaagtagctgataac

SEQ ID NO: 3790 - DNA, 28 bp, Vibrio parahaemolyticus
  Vibrio parahaemolyticus 857865
gaatactgccgaacaggtaggaggctca

SEQ ID NO: 3791 - DNA, 31 bp, Vibrio parahaemolyticus; identical to SEQ ID NO: 1876
  Vibrio parahaemolyticus 857865

SEQ ID NO: 3792 - DNA, 31 bp, Vibrio parahaemolyticus; identical to SEQ ID NO: 1877
  Vibrio parahaemolyticus 857865

SEQ ID NO: 3793 - DNA, 31 bp, Vibrio parahaemolyticus; identical to SEQ ID NO: 1878
  Vibrio parahaemolyticus 857865

SEQ ID NO: 3794 - DNA, 28 bp, Vibrio parahaemolyticus
  Vibrio parahaemolyticus 855673
gtgaactgccgaataggtagctgataat

SEQ ID NO: 3795 - DNA, 28 bp, Vibrio parahaemolyticus
  Vibrio parahaemolyticus 855673
gtgaactgccgcataggtagagaggatc

SEQ ID NO: 3796 - DNA, 28 bp, Vibrio parahaemolyticus
  Vibrio parahaemolyticus 855673
tcatcactactgaaaagtagctgataac

SEQ ID NO: 3797 - DNA, 28 bp, Vibrio parahaemolyticus
  Vibrio parahaemolyticus 855673
gaatactgccgaacaggtaggaggctca

SEQ ID NO: 3798 - DNA, 31 bp, Vibrio parahaemolyticus; identical to SEQ ID NO: 1876
  Vibrio parahaemolyticus 855673

SEQ ID NO: 3799 - DNA, 31 bp, Vibrio parahaemolyticus; identical to SEQ ID NO: 1877
  Vibrio parahaemolyticus 855673

SEQ ID NO: 3800 - DNA, 31 bp, Vibrio parahaemolyticus; identical to SEQ ID NO: 1878
  Vibrio parahaemolyticus 855673

SEQ ID NO: 3801 - DNA, 28 bp, Vibrio parahaemolyticus
  Vibrio parahaemolyticus 237135
gtgaactgccgaataggtagctgataat

SEQ ID NO: 3802 - DNA, 28 bp, Vibrio parahaemolyticus
  Vibrio parahaemolyticus 237135
gtgaactgccgcataggtagagagaatc

SEQ ID NO: 3803 - DNA, 28 bp, Vibrio parahaemolyticus
  Vibrio parahaemolyticus 237135
tcattactactaaaaagtagctgataac

SEQ ID NO: 3804 - DNA, 28 bp, Vibrio parahaemolyticus
  Vibrio parahaemolyticus 237135
gaatactgccgaacaggtaggaggctca

SEQ ID NO: 3805 - DNA, 32 bp, Vibrio parahaemolyticus; identical to SEQ ID NO: 1946
  Vibrio parahaemolyticus 237135

SEQ ID NO: 3806 - DNA, 31 bp, Vibrio parahaemolyticus; identical to SEQ ID NO: 1947
  Vibrio parahaemolyticus 237135

SEQ ID NO: 3807 - DNA, 31 bp, Vibrio parahaemolyticus; identical to SEQ ID NO: 1877
  Vibrio parahaemolyticus 237135

SEQ ID NO: 3808 - DNA, 31 bp, Vibrio parahaemolyticus; identical to SEQ ID NO: 1878
  Vibrio parahaemolyticus 237135

SEQ ID NO: 3809 - DNA, 28 bp, Vibrio parahaemolyticus
  Vibrio parahaemolyticus 481270
gtgaactgccgaataggtagctgataat

SEQ ID NO: 3810 - DNA, 28 bp, Vibrio parahaemolyticus
  Vibrio parahaemolyticus 481270
gtgaactgccgcataggtagagaggatc

SEQ ID NO: 3811 - DNA, 28 bp, Vibrio parahaemolyticus
  Vibrio parahaemolyticus 481270
tcatcactactgaaaagtagctgataac

SEQ ID NO: 3812 - DNA, 28 bp, Vibrio parahaemolyticus
  Vibrio parahaemolyticus 481270
gaatactgccgaacaggtaggaggctca

SEQ ID NO: 3813 - DNA, 31 bp, Vibrio parahaemolyticus; identical to SEQ ID NO: 1876
  Vibrio parahaemolyticus 481270

SEQ ID NO: 3814 - DNA, 31 bp, Vibrio parahaemolyticus; identical to SEQ ID NO: 1877
  Vibrio parahaemolyticus 481270

SEQ ID NO: 3815 - DNA, 31 bp, Vibrio parahaemolyticus; identical to SEQ ID NO: 1970
  Vibrio parahaemolyticus 481270

SEQ ID NO: 3816 - DNA, 28 bp, Vibrio parahaemolyticus
  Vibrio parahaemolyticus 237865
gtgaactgccgaataggtagctgataat

SEQ ID NO: 3817 - DNA, 28 bp, Vibrio parahaemolyticus
  Vibrio parahaemolyticus 237865
gtgaactgccgcataggtagagagaatc

SEQ ID NO: 3818 - DNA, 28 bp, Vibrio parahaemolyticus
  Vibrio parahaemolyticus 237865
tcattactactaaaaagtagctgataac

SEQ ID NO: 3819 - DNA, 28 bp, Vibrio parahaemolyticus
  Vibrio parahaemolyticus 237865
gaatactgccgaacaggtaggaggctca

SEQ ID NO: 3820 - DNA, 32 bp, Vibrio parahaemolyticus; identical to SEQ ID NO: 1946
  Vibrio parahaemolyticus 237865

SEQ ID NO: 3821 - DNA, 31 bp, Vibrio parahaemolyticus; identical to SEQ ID NO: 1947
  Vibrio parahaemolyticus 237865

SEQ ID NO: 3822 - DNA, 31 bp, Vibrio parahaemolyticus; identical to SEQ ID NO: 1877
  Vibrio parahaemolyticus 237865

SEQ ID NO: 3823 - DNA, 31 bp, Vibrio parahaemolyticus; identical to SEQ ID NO: 1878
  Vibrio parahaemolyticus 237865

SEQ ID NO: 3824 - DNA, 28 bp, Vibrio parahaemolyticus
  Vibrio parahaemolyticus 872109
gtgaactgccgaataggtagctgataat

SEQ ID NO: 3825 - DNA, 28 bp, Vibrio parahaemolyticus
  Vibrio parahaemolyticus 872109
gtgaactgccgcataggtagagaggatc

SEQ ID NO: 3826 - DNA, 28 bp, Vibrio parahaemolyticus
  Vibrio parahaemolyticus 872109
tcatcactactgaaaagtagctgataac

SEQ ID NO: 3827 - DNA, 28 bp, Vibrio parahaemolyticus
  Vibrio parahaemolyticus 872109
gaatactgccgaacaggtaggaggctca

SEQ ID NO: 3828 - DNA, 31 bp, Vibrio parahaemolyticus; identical to SEQ ID NO: 1876
  Vibrio parahaemolyticus 872109

SEQ ID NO: 3829 - DNA, 31 bp, Vibrio parahaemolyticus; identical to SEQ ID NO: 1877
  Vibrio parahaemolyticus 872109

SEQ ID NO: 3830 - DNA, 31 bp, Vibrio parahaemolyticus; identical to SEQ ID NO: 1970
  Vibrio parahaemolyticus 872109

SEQ ID NO: 3831 - DNA, 28 bp, Vibrio parahaemolyticus
  Vibrio parahaemolyticus MAVP-E
gtgaactgccgaataggtagctgataat

SEQ ID NO: 3832 - DNA, 28 bp, Vibrio parahaemolyticus
  Vibrio parahaemolyticus MAVP-E
gtgaactgccgcataggtagagaggatc

SEQ ID NO: 3833 - DNA, 28 bp, Vibrio parahaemolyticus
  Vibrio parahaemolyticus MAVP-E
tcatcactactgaaaagtagctgataac

SEQ ID NO: 3834 - DNA, 28 bp, Vibrio parahaemolyticus
  Vibrio parahaemolyticus MAVP-E
gaatactgccgaacaggtaggaggctca

SEQ ID NO: 3835 - DNA, 31 bp, Vibrio parahaemolyticus; identical to SEQ ID NO: 1876
  Vibrio parahaemolyticus MAVP-E

SEQ ID NO: 3836 - DNA, 31 bp, Vibrio parahaemolyticus; identical to SEQ ID NO: 1877
  Vibrio parahaemolyticus MAVP-E

SEQ ID NO: 3837 - DNA, 31 bp, Vibrio parahaemolyticus; identical to SEQ ID NO: 1878
  Vibrio parahaemolyticus MAVP-E

SEQ ID NO: 3838 - DNA, 28 bp, Vibrio parahaemolyticus
  Vibrio parahaemolyticus FDAARGOS_51
gtgaactgccgaataggtagctgataat

SEQ ID NO: 3839 - DNA, 28 bp, Vibrio parahaemolyticus
  Vibrio parahaemolyticus FDAARGOS_51
gtgaactgccgcataggtagagaggatc

SEQ ID NO: 3840 - DNA, 28 bp, Vibrio parahaemolyticus
  Vibrio parahaemolyticus FDAARGOS_51
tcatcactactgaaaagtagctgataac

SEQ ID NO: 3841 - DNA, 28 bp, Vibrio parahaemolyticus
  Vibrio parahaemolyticus FDAARGOS_51
gaatactgccgaacaggtaggaggctca

SEQ ID NO: 3842 - DNA, 31 bp, Vibrio parahaemolyticus; identical to SEQ ID NO: 1876
  Vibrio parahaemolyticus FDAARGOS_51

SEQ ID NO: 3843 - DNA, 31 bp, Vibrio parahaemolyticus; identical to SEQ ID NO: 1877
  Vibrio parahaemolyticus FDAARGOS_51

SEQ ID NO: 3844 - DNA, 31 bp, Vibrio parahaemolyticus; identical to SEQ ID NO: 1878
  Vibrio parahaemolyticus FDAARGOS_51

SEQ ID NO: 3845 - DNA, 28 bp, Vibrio parahaemolyticus
  Vibrio parahaemolyticus S448-16
gtgaactgccgaataggtagctgataat

SEQ ID NO: 3846 - DNA, 28 bp, Vibrio parahaemolyticus
  Vibrio parahaemolyticus S448-16
atgaactgccgaataggtagagaggagc

SEQ ID NO: 3847 - DNA, 28 bp, Vibrio parahaemolyticus
  Vibrio parahaemolyticus S448-16
tcattactacttaaaagtagctgataac

SEQ ID NO: 3848 - DNA, 28 bp, Vibrio parahaemolyticus
  Vibrio parahaemolyticus S448-16
gaatactgccgaacaggtaggaggctca

SEQ ID NO: 3849 - DNA, 31 bp, Vibrio parahaemolyticus; identical to SEQ ID NO: 1897
  Vibrio parahaemolyticus S448-16

SEQ ID NO: 3850 - DNA, 31 bp, Vibrio parahaemolyticus; identical to SEQ ID NO: 1877
  Vibrio parahaemolyticus S448-16

SEQ ID NO: 3851 - DNA, 31 bp, Vibrio parahaemolyticus; identical to SEQ ID NO: 1878
  Vibrio parahaemolyticus S448-16

SEQ ID NO: 3852 - DNA, 28 bp, Vibrio parahaemolyticus
  Vibrio parahaemolyticus S487-4
gtgaactgccgaataggtagctgataat

SEQ ID NO: 3853 - DNA, 28 bp, Vibrio parahaemolyticus
  Vibrio parahaemolyticus S487-4
gtgaactgccgcataggtagagaggatc

SEQ ID NO: 3854 - DNA, 28 bp, Vibrio parahaemolyticus
  Vibrio parahaemolyticus S487-4
tcatcactactgaaaagtagctgataac

SEQ ID NO: 3855 - DNA, 28 bp, Vibrio parahaemolyticus
  Vibrio parahaemolyticus S487-4
gaatactgccgaacaggtaggaggctca

SEQ ID NO: 3856 - DNA, 31 bp, Vibrio parahaemolyticus; identical to SEQ ID NO: 1876
  Vibrio parahaemolyticus S487-4

SEQ ID NO: 3857 - DNA, 31 bp, Vibrio parahaemolyticus; identical to SEQ ID NO: 1877
  Vibrio parahaemolyticus S487-4

SEQ ID NO: 3858 - DNA, 31 bp, Vibrio parahaemolyticus; identical to SEQ ID NO: 1878
  Vibrio parahaemolyticus S487-4

SEQ ID NO: 3859 - DNA, 28 bp, Vibrio parahaemolyticus
  Vibrio parahaemolyticus PMC58.5
gtgaactgccgaataggtagctgataat

SEQ ID NO: 3860 - DNA, 28 bp, Vibrio parahaemolyticus
  Vibrio parahaemolyticus PMC58.5
gtgaactgccgcataggtagagagaatc

SEQ ID NO: 3861 - DNA, 28 bp, Vibrio parahaemolyticus
  Vibrio parahaemolyticus PMC58.5
tcattactactaaaaagtagctgataac

SEQ ID NO: 3862 - DNA, 28 bp, Vibrio parahaemolyticus
  Vibrio parahaemolyticus PMC58.5
gaatactgccgaacaggtaggaggctca

SEQ ID NO: 3863 - DNA, 32 bp, Vibrio parahaemolyticus; identical to SEQ ID NO: 1946
  Vibrio parahaemolyticus PMC58.5

SEQ ID NO: 3864 - DNA, 31 bp, Vibrio parahaemolyticus; identical to SEQ ID NO: 1947
  Vibrio parahaemolyticus PMC58.5

SEQ ID NO: 3865 - DNA, 31 bp, Vibrio parahaemolyticus; identical to SEQ ID NO: 1877
  Vibrio parahaemolyticus PMC58.5

SEQ ID NO: 3866 - DNA, 31 bp, Vibrio parahaemolyticus; identical to SEQ ID NO: 1878
  Vibrio parahaemolyticus PMC58.5

SEQ ID NO: 3867 - DNA, 28 bp, Vibrio parahaemolyticus
  Vibrio parahaemolyticus PMC14.7
gtgaactgccgaataggtagctgataat

SEQ ID NO: 3868 - DNA, 28 bp, Vibrio parahaemolyticus
  Vibrio parahaemolyticus PMC14.7
gtgaactgccgcataggtagagagaatc

SEQ ID NO: 3869 - DNA, 28 bp, Vibrio parahaemolyticus
  Vibrio parahaemolyticus PMC14.7
tcattactactaaaaagtagctgataac

SEQ ID NO: 3870 - DNA, 28 bp, Vibrio parahaemolyticus
  Vibrio parahaemolyticus PMC14.7
gaatactgccgaacaggtaggaggctca

SEQ ID NO: 3871 - DNA, 32 bp, Vibrio parahaemolyticus; identical to SEQ ID NO: 1946
  Vibrio parahaemolyticus PMC14.7

SEQ ID NO: 3872 - DNA, 31 bp, Vibrio parahaemolyticus; identical to SEQ ID NO: 1947
  Vibrio parahaemolyticus PMC14.7

SEQ ID NO: 3873 - DNA, 31 bp, Vibrio parahaemolyticus; identical to SEQ ID NO: 1877
  Vibrio parahaemolyticus PMC14.7

SEQ ID NO: 3874 - DNA, 31 bp, Vibrio parahaemolyticus; identical to SEQ ID NO: 1878
  Vibrio parahaemolyticus PMC14.7

SEQ ID NO: 3875 - DNA, 28 bp, Vibrio parahaemolyticus
  Vibrio parahaemolyticus K23
gtgaactgccgaataggtagctgataat

SEQ ID NO: 3876 - DNA, 28 bp, Vibrio parahaemolyticus
  Vibrio parahaemolyticus K23
gtgaactgccgaataggtagagaggatc

SEQ ID NO: 3877 - DNA, 28 bp, Vibrio parahaemolyticus
  Vibrio parahaemolyticus K23
tcattactactggaaagtagctgataac

SEQ ID NO: 3878 - DNA, 28 bp, Vibrio parahaemolyticus
  Vibrio parahaemolyticus K23
gaatactgccgaacaggtaggaggctca

SEQ ID NO: 3879 - DNA, 32 bp, Vibrio parahaemolyticus; identical to SEQ ID NO: 2310
  Vibrio parahaemolyticus K23

SEQ ID NO: 3880 - DNA, 31 bp, Vibrio parahaemolyticus; identical to SEQ ID NO: 1877
  Vibrio parahaemolyticus K23

SEQ ID NO: 3881 - DNA, 31 bp, Vibrio parahaemolyticus; identical to SEQ ID NO: 1970
  Vibrio parahaemolyticus K23

SEQ ID NO: 3882 - DNA, 28 bp, Vibrio parahaemolyticus
  Vibrio parahaemolyticus M59787
gtgaactgccgaataggtagctgataat

SEQ ID NO: 3883 - DNA, 28 bp, Vibrio parahaemolyticus
  Vibrio parahaemolyticus M59787
gtgaactgccgcataggtagagaggatc

SEQ ID NO: 3884 - DNA, 28 bp, Vibrio parahaemolyticus
  Vibrio parahaemolyticus M59787
tcatcactactgaaaagtagctgataac

SEQ ID NO: 3885 - DNA, 28 bp, Vibrio parahaemolyticus
  Vibrio parahaemolyticus M59787
gaatactgccgaacaggtaggaggctca

SEQ ID NO: 3886 - DNA, 31 bp, Vibrio parahaemolyticus; identical to SEQ ID NO: 1876
  Vibrio parahaemolyticus M59787

SEQ ID NO: 3887 - DNA, 31 bp, Vibrio parahaemolyticus; identical to SEQ ID NO: 1877
  Vibrio parahaemolyticus M59787

SEQ ID NO: 3888 - DNA, 31 bp, Vibrio parahaemolyticus; identical to SEQ ID NO: 1878
  Vibrio parahaemolyticus M59787

SEQ ID NO: 3889 - DNA, 28 bp, Vibrio parahaemolyticus
  Vibrio parahaemolyticus H64024
gtgaactgccgaataggtagctgataat

SEQ ID NO: 3890 - DNA, 28 bp, Vibrio parahaemolyticus
  Vibrio parahaemolyticus H64024
gtgaactgccgcataggtagagaggatc

SEQ ID NO: 3891 - DNA, 28 bp, Vibrio parahaemolyticus
  Vibrio parahaemolyticus H64024
tcatcactactgaaaagtagctgataac

SEQ ID NO: 3892 - DNA, 28 bp, Vibrio parahaemolyticus
  Vibrio parahaemolyticus H64024
gaatactgccgaacaggtaggaggctca

SEQ ID NO: 3893 - DNA, 31 bp, Vibrio parahaemolyticus; identical to SEQ ID NO: 1876
  Vibrio parahaemolyticus H64024

SEQ ID NO: 3894 - DNA, 31 bp, Vibrio parahaemolyticus; identical to SEQ ID NO: 1877
  Vibrio parahaemolyticus H64024

SEQ ID NO: 3895 - DNA, 31 bp, Vibrio parahaemolyticus; identical to SEQ ID NO: 1878
  Vibrio parahaemolyticus H64024

SEQ ID NO: 3896 - DNA, 28 bp, Vibrio parahaemolyticus
  Vibrio parahaemolyticus F4395
gtgaactgccgaataggtagctgataat

SEQ ID NO: 3897 - DNA, 28 bp, Vibrio parahaemolyticus
  Vibrio parahaemolyticus F4395
gtgaactgccgcataggtagagaggatc

SEQ ID NO: 3898 - DNA, 28 bp, Vibrio parahaemolyticus
  Vibrio parahaemolyticus F4395
tcatcactactgaaaagtagctgataac

SEQ ID NO: 3899 - DNA, 28 bp, Vibrio parahaemolyticus
  Vibrio parahaemolyticus F4395
gaatactgccgaacaggtaggaggctca

SEQ ID NO: 3900 - DNA, 31 bp, Vibrio parahaemolyticus; identical to SEQ ID NO: 1876
  Vibrio parahaemolyticus F4395

SEQ ID NO: 3901 - DNA, 31 bp, Vibrio parahaemolyticus; identical to SEQ ID NO: 1877
  Vibrio parahaemolyticus F4395

SEQ ID NO: 3902 - DNA, 31 bp, Vibrio parahaemolyticus; identical to SEQ ID NO: 1878
  Vibrio parahaemolyticus F4395

SEQ ID NO: 3903 - DNA, 28 bp, Vibrio parahaemolyticus
  Vibrio parahaemolyticus A3EZ136
gtgaactgccgaataggtagctgataat

SEQ ID NO: 3904 - DNA, 28 bp, Vibrio parahaemolyticus
  Vibrio parahaemolyticus A3EZ136
gtgaactgccgcataggtagagagaatc

SEQ ID NO: 3905 - DNA, 28 bp, Vibrio parahaemolyticus
  Vibrio parahaemolyticus A3EZ136
tcattactactaaaaagtagctgataac

SEQ ID NO: 3906 - DNA, 28 bp, Vibrio parahaemolyticus
  Vibrio parahaemolyticus A3EZ136
gaatactgccgaacaggtaggaggctca

SEQ ID NO: 3907 - DNA, 32 bp, Vibrio parahaemolyticus; identical to SEQ ID NO: 1946
  Vibrio parahaemolyticus A3EZ136

SEQ ID NO: 3908 - DNA, 31 bp, Vibrio parahaemolyticus; identical to SEQ ID NO: 1947
  Vibrio parahaemolyticus A3EZ136

SEQ ID NO: 3909 - DNA, 31 bp, Vibrio parahaemolyticus; identical to SEQ ID NO: 1877
  Vibrio parahaemolyticus A3EZ136

SEQ ID NO: 3910 - DNA, 31 bp, Vibrio parahaemolyticus; identical to SEQ ID NO: 1878
  Vibrio parahaemolyticus A3EZ136

SEQ ID NO: 3911 - DNA, 28 bp, Vibrio parahaemolyticus
  Vibrio parahaemolyticus T8994
gtgaactgccgaataggtagctgataat

SEQ ID NO: 3912 - DNA, 28 bp, Vibrio parahaemolyticus
  Vibrio parahaemolyticus T8994
gtgaactgccgcataggtagagaggatc

SEQ ID NO: 3913 - DNA, 28 bp, Vibrio parahaemolyticus
  Vibrio parahaemolyticus T8994
tcatcactactgaaaagtagctgataac

SEQ ID NO: 3914 - DNA, 28 bp, Vibrio parahaemolyticus
  Vibrio parahaemolyticus T8994
gaatactgccgaacaggtaggaggctca

SEQ ID NO: 3915 - DNA, 31 bp, Vibrio parahaemolyticus; identical to SEQ ID NO: 1876
  Vibrio parahaemolyticus T8994

SEQ ID NO: 3916 - DNA, 31 bp, Vibrio parahaemolyticus; identical to SEQ ID NO: 1877
  Vibrio parahaemolyticus T8994

SEQ ID NO: 3917 - DNA, 31 bp, Vibrio parahaemolyticus; identical to SEQ ID NO: 1878
  Vibrio parahaemolyticus T8994

SEQ ID NO: 3918 - DNA, 28 bp, Vibrio parahaemolyticus
  Vibrio parahaemolyticus 388802
gtgaactgccgaataggtagctgataat

SEQ ID NO: 3919 - DNA, 28 bp, Vibrio parahaemolyticus
  Vibrio parahaemolyticus 388802
gtgaactgccgcataggtagagagaatc

SEQ ID NO: 3920 - DNA, 28 bp, Vibrio parahaemolyticus
  Vibrio parahaemolyticus 388802
tcattactactaaaaagtagctgataac

SEQ ID NO: 3921 - DNA, 28 bp, Vibrio parahaemolyticus
  Vibrio parahaemolyticus 388802
gaatactgccgaacaggtaggaggctca

SEQ ID NO: 3922 - DNA, 32 bp, Vibrio parahaemolyticus; identical to SEQ ID NO: 2035
  Vibrio parahaemolyticus 388802

SEQ ID NO: 3923 - DNA, 31 bp, Vibrio parahaemolyticus; identical to SEQ ID NO: 1947
  Vibrio parahaemolyticus 388802

SEQ ID NO: 3924 - DNA, 31 bp, Vibrio parahaemolyticus; identical to SEQ ID NO: 1877
  Vibrio parahaemolyticus 388802

SEQ ID NO: 3925 - DNA, 31 bp, Vibrio parahaemolyticus; identical to SEQ ID NO: 2038
  Vibrio parahaemolyticus 388802

SEQ ID NO: 3926 - DNA, 28 bp, Vibrio parahaemolyticus
  Vibrio parahaemolyticus A0EZ383
gtgaactgccgaataggtagctgataat

SEQ ID NO: 3927 - DNA, 28 bp, Vibrio parahaemolyticus
  Vibrio parahaemolyticus A0EZ383
gtgaactgccgcataggtagagaggatc

SEQ ID NO: 3928 - DNA, 28 bp, Vibrio parahaemolyticus
  Vibrio parahaemolyticus A0EZ383
tcattactacttaaaagtagctgataac

SEQ ID NO: 3929 - DNA, 28 bp, Vibrio parahaemolyticus
  Vibrio parahaemolyticus A0EZ383
gaatactgccgaacaggtaggaggctca

SEQ ID NO: 3930 - DNA, 31 bp, Vibrio parahaemolyticus; identical to SEQ ID NO: 2018
  Vibrio parahaemolyticus A0EZ383

SEQ ID NO: 3931 - DNA, 31 bp, Vibrio parahaemolyticus; identical to SEQ ID NO: 1947
  Vibrio parahaemolyticus A0EZ383

SEQ ID NO: 3932 - DNA, 31 bp, Vibrio parahaemolyticus; identical to SEQ ID NO: 1877
  Vibrio parahaemolyticus A0EZ383

SEQ ID NO: 3933 - DNA, 31 bp, Vibrio parahaemolyticus; identical to SEQ ID NO: 1970
  Vibrio parahaemolyticus A0EZ383

SEQ ID NO: 3934 - DNA, 28 bp, Vibrio parahaemolyticus
  Vibrio parahaemolyticus A3EZ770
gtgaactgccgaataggtagctgataat

SEQ ID NO: 3935 - DNA, 28 bp, Vibrio parahaemolyticus
  Vibrio parahaemolyticus A3EZ770
gtgaactgccgcataggtagagaggatc

SEQ ID NO: 3936 - DNA, 28 bp, Vibrio parahaemolyticus
  Vibrio parahaemolyticus A3EZ770
tcatcactactgaaaagtagctgataac

SEQ ID NO: 3937 - DNA, 28 bp, Vibrio parahaemolyticus
  Vibrio parahaemolyticus A3EZ770
gaatactgccgaacaggtaggaggctca

SEQ ID NO: 3938 - DNA, 31 bp, Vibrio parahaemolyticus; identical to SEQ ID NO: 1876
  Vibrio parahaemolyticus A3EZ770

SEQ ID NO: 3939 - DNA, 31 bp, Vibrio parahaemolyticus; identical to SEQ ID NO: 1877
  Vibrio parahaemolyticus A3EZ770

SEQ ID NO: 3940 - DNA, 31 bp, Vibrio parahaemolyticus; identical to SEQ ID NO: 1970
  Vibrio parahaemolyticus A3EZ770

SEQ ID NO: 3941 - DNA, 28 bp, Vibrio parahaemolyticus
  Vibrio parahaemolyticus A1EZ952
gtgaactgccgaataggtagctgataat

SEQ ID NO: 3942 - DNA, 28 bp, Vibrio parahaemolyticus
  Vibrio parahaemolyticus A1EZ952
gtgaactgccgcataggtagagaggatc

SEQ ID NO: 3943 - DNA, 28 bp, Vibrio parahaemolyticus
  Vibrio parahaemolyticus A1EZ952
tcatcactactgaaaagtagctgataac

SEQ ID NO: 3944 - DNA, 28 bp, Vibrio parahaemolyticus
  Vibrio parahaemolyticus A1EZ952
gaatactgccgaacaggtaggaggctca

SEQ ID NO: 3945 - DNA, 31 bp, Vibrio parahaemolyticus; identical to SEQ ID NO: 1876
  Vibrio parahaemolyticus A1EZ952

SEQ ID NO: 3946 - DNA, 31 bp, Vibrio parahaemolyticus; identical to SEQ ID NO: 1877
  Vibrio parahaemolyticus A1EZ952

SEQ ID NO: 3947 - DNA, 31 bp, Vibrio parahaemolyticus; identical to SEQ ID NO: 1970
  Vibrio parahaemolyticus A1EZ952

SEQ ID NO: 3948 - DNA, 28 bp, Vibrio parahaemolyticus
  Vibrio parahaemolyticus C146
gtgaactgccgaataggtagctgataat

SEQ ID NO: 3949 - DNA, 28 bp, Vibrio parahaemolyticus
  Vibrio parahaemolyticus C146
gtgaactgccgaataggtagagaggatc

SEQ ID NO: 3950 - DNA, 28 bp, Vibrio parahaemolyticus
  Vibrio parahaemolyticus C146
tcattactactgaaaagtagctgataac

SEQ ID NO: 3951 - DNA, 28 bp, Vibrio parahaemolyticus
  Vibrio parahaemolyticus C146
gaatactgccgaacaggtaggaggctca

SEQ ID NO: 3952 - DNA, 32 bp, Vibrio parahaemolyticus; identical to SEQ ID NO: 2310
  Vibrio parahaemolyticus C146

SEQ ID NO: 3953 - DNA, 31 bp, Vibrio parahaemolyticus; identical to SEQ ID NO: 1877
  Vibrio parahaemolyticus C146

SEQ ID NO: 3954 - DNA, 31 bp, Vibrio parahaemolyticus; identical to SEQ ID NO: 1878
  Vibrio parahaemolyticus C146

SEQ ID NO: 3955 - DNA, 28 bp, Vibrio parahaemolyticus
  Vibrio parahaemolyticus A5Z652
gtgaactgccgaataggtagctgataat

SEQ ID NO: 3956 - DNA, 28 bp, Vibrio parahaemolyticus
  Vibrio parahaemolyticus A5Z652
gtgaactgccgcataggtagagaggatc

SEQ ID NO: 3957 - DNA, 28 bp, Vibrio parahaemolyticus
  Vibrio parahaemolyticus A5Z652
tcatcactactgaaaagtagctgataac

SEQ ID NO: 3958 - DNA, 28 bp, Vibrio parahaemolyticus
  Vibrio parahaemolyticus A5Z652
gaatactgccgaacaggtaggaggctca

SEQ ID NO: 3959 - DNA, 31 bp, Vibrio parahaemolyticus; identical to SEQ ID NO: 1876
  Vibrio parahaemolyticus A5Z652

SEQ ID NO: 3960 - DNA, 31 bp, Vibrio parahaemolyticus; identical to SEQ ID NO: 1877
  Vibrio parahaemolyticus A5Z652

SEQ ID NO: 3961 - DNA, 31 bp, Vibrio parahaemolyticus; identical to SEQ ID NO: 1878
  Vibrio parahaemolyticus A5Z652

SEQ ID NO: 3962 - DNA, 28 bp, Vibrio parahaemolyticus
  Vibrio parahaemolyticus A5Z860
gtgaactgccgaataggtagctgataat

SEQ ID NO: 3963 - DNA, 28 bp, Vibrio parahaemolyticus
  Vibrio parahaemolyticus A5Z860
gtgaactgccgcataggtagagaggatc

SEQ ID NO: 3964 - DNA, 28 bp, Vibrio parahaemolyticus
  Vibrio parahaemolyticus A5Z860
tcatcactactgaaaagtagctgataac

SEQ ID NO: 3965 - DNA, 28 bp, Vibrio parahaemolyticus
  Vibrio parahaemolyticus A5Z860
gaatactgccgaacaggtaggaggctca

SEQ ID NO: 3966 - DNA, 31 bp, Vibrio parahaemolyticus; identical to SEQ ID NO: 1876
  Vibrio parahaemolyticus A5Z860

SEQ ID NO: 3967 - DNA, 31 bp, Vibrio parahaemolyticus; identical to SEQ ID NO: 1877
  Vibrio parahaemolyticus A5Z860

SEQ ID NO: 3968 - DNA, 31 bp, Vibrio parahaemolyticus; identical to SEQ ID NO: 1970
  Vibrio parahaemolyticus A5Z860

SEQ ID NO: 3969 - DNA, 28 bp, Vibrio parahaemolyticus
  Vibrio parahaemolyticus A5Z878
gtgaactgccgaataggtagctgataat

SEQ ID NO: 3970 - DNA, 28 bp, Vibrio parahaemolyticus
  Vibrio parahaemolyticus A5Z878
gtgaactgccgcataggtagagaggatc

SEQ ID NO: 3971 - DNA, 28 bp, Vibrio parahaemolyticus
  Vibrio parahaemolyticus A5Z878
tcatcactactgaaaagtagctgataac

SEQ ID NO: 3972 - DNA, 28 bp, Vibrio parahaemolyticus
  Vibrio parahaemolyticus A5Z878
gaatactgccgaacaggtaggaggctca

SEQ ID NO: 3973 - DNA, 31 bp, Vibrio parahaemolyticus; identical to SEQ ID NO: 1876
  Vibrio parahaemolyticus A5Z878

SEQ ID NO: 3974 - DNA, 31 bp, Vibrio parahaemolyticus; identical to SEQ ID NO: 1877
  Vibrio parahaemolyticus A5Z878

SEQ ID NO: 3975 - DNA, 31 bp, Vibrio parahaemolyticus; identical to SEQ ID NO: 1878
  Vibrio parahaemolyticus A5Z878

SEQ ID NO: 3976 - DNA, 28 bp, Vibrio parahaemolyticus
  Vibrio parahaemolyticus CFSAN025063
gtgaactgccgaataggtagctgataat

SEQ ID NO: 3977 - DNA, 28 bp, Vibrio parahaemolyticus
  Vibrio parahaemolyticus CFSAN025063
gtgaactgccgcataggtagagagaatc

SEQ ID NO: 3978 - DNA, 28 bp, Vibrio parahaemolyticus
  Vibrio parahaemolyticus CFSAN025063
tcattactactaaaaagtagctgataac

SEQ ID NO: 3979 - DNA, 28 bp, Vibrio parahaemolyticus
  Vibrio parahaemolyticus CFSAN025063
gaatactgccgaacaggtaggaggctca

SEQ ID NO: 3980 - DNA, 32 bp, Vibrio parahaemolyticus; identical to SEQ ID NO: 2034
  Vibrio parahaemolyticus CFSAN025063

SEQ ID NO: 3981 - DNA, 32 bp, Vibrio parahaemolyticus; identical to SEQ ID NO: 2035
  Vibrio parahaemolyticus CFSAN025063

SEQ ID NO: 3982 - DNA, 31 bp, Vibrio parahaemolyticus; identical to SEQ ID NO: 1947
  Vibrio parahaemolyticus CFSAN025063

SEQ ID NO: 3983 - DNA, 31 bp, Vibrio parahaemolyticus; identical to SEQ ID NO: 1877
  Vibrio parahaemolyticus CFSAN025063

SEQ ID NO: 3984 - DNA, 31 bp, Vibrio parahaemolyticus; identical to SEQ ID NO: 2038
  Vibrio parahaemolyticus CFSAN025063

SEQ ID NO: 3985 - DNA, 28 bp, Vibrio parahaemolyticus
  Vibrio parahaemolyticus CFSAN029653
gtgaactgccgaataggtagctgataat

SEQ ID NO: 3986 - DNA, 28 bp, Vibrio parahaemolyticus
  Vibrio parahaemolyticus CFSAN029653
gtgaactgccgcataggtagagagaatc

SEQ ID NO: 3987 - DNA, 28 bp, Vibrio parahaemolyticus
  Vibrio parahaemolyticus CFSAN029653
tcattactactaaaaagtagctgataac

SEQ ID NO: 3988 - DNA, 28 bp, Vibrio parahaemolyticus
  Vibrio parahaemolyticus CFSAN029653
gaatactgccgaacaggtaggaggctca

SEQ ID NO: 3989 - DNA, 32 bp, Vibrio parahaemolyticus; identical to SEQ ID NO: 2034
  Vibrio parahaemolyticus CFSAN029653

SEQ ID NO: 3990 - DNA, 32 bp, Vibrio parahaemolyticus; identical to SEQ ID NO: 2035
  Vibrio parahaemolyticus CFSAN029653

SEQ ID NO: 3991 - DNA, 31 bp, Vibrio parahaemolyticus; identical to SEQ ID NO: 1947
  Vibrio parahaemolyticus CFSAN029653

SEQ ID NO: 3992 - DNA, 31 bp, Vibrio parahaemolyticus; identical to SEQ ID NO: 1877
  Vibrio parahaemolyticus CFSAN029653

SEQ ID NO: 3993 - DNA, 31 bp, Vibrio parahaemolyticus; identical to SEQ ID NO: 2038
  Vibrio parahaemolyticus CFSAN029653

SEQ ID NO: 3994 - DNA, 28 bp, Vibrio parahaemolyticus
  Vibrio parahaemolyticus CFSAN025064
gtgaactgccgaataggtagctgataat

SEQ ID NO: 3995 - DNA, 28 bp, Vibrio parahaemolyticus
  Vibrio parahaemolyticus CFSAN025064
gtgaactgccgcataggtagagagaatc

SEQ ID NO: 3996 - DNA, 28 bp, Vibrio parahaemolyticus
  Vibrio parahaemolyticus CFSAN025064
tcattactactaaaaagtagctgataac

SEQ ID NO: 3997 - DNA, 28 bp, Vibrio parahaemolyticus
  Vibrio parahaemolyticus CFSAN025064
gaatactgccgaacaggtaggaggctca

SEQ ID NO: 3998 - DNA, 32 bp, Vibrio parahaemolyticus; identical to SEQ ID NO: 2034
  Vibrio parahaemolyticus CFSAN025064

SEQ ID NO: 3999 - DNA, 32 bp, Vibrio parahaemolyticus; identical to SEQ ID NO: 2035
  Vibrio parahaemolyticus CFSAN025064

SEQ ID NO: 4000 - DNA, 31 bp, Vibrio parahaemolyticus; identical to SEQ ID NO: 1947
  Vibrio parahaemolyticus CFSAN025064

SEQ ID NO: 4001 - DNA, 31 bp, Vibrio parahaemolyticus; identical to SEQ ID NO: 1877
  Vibrio parahaemolyticus CFSAN025064

SEQ ID NO: 4002 - DNA, 31 bp, Vibrio parahaemolyticus; identical to SEQ ID NO: 2038
  Vibrio parahaemolyticus CFSAN025064

SEQ ID NO: 4003 - DNA, 28 bp, Vibrio parahaemolyticus
  Vibrio parahaemolyticus CFSAN025056
gtgaactgccgaataggtagctgataat

SEQ ID NO: 4004 - DNA, 28 bp, Vibrio parahaemolyticus
  Vibrio parahaemolyticus CFSAN025056
gtgaactgccgcataggtagagagaatc

SEQ ID NO: 4005 - DNA, 28 bp, Vibrio parahaemolyticus
  Vibrio parahaemolyticus CFSAN025056
tcattactactaaaaagtagctgataac

SEQ ID NO: 4006 - DNA, 28 bp, Vibrio parahaemolyticus
  Vibrio parahaemolyticus CFSAN025056
gaatactgccgaacaggtaggaggctca

SEQ ID NO: 4007 - DNA, 32 bp, Vibrio parahaemolyticus; identical to SEQ ID NO: 2034
  Vibrio parahaemolyticus CFSAN025056

SEQ ID NO: 4008 - DNA, 32 bp, Vibrio parahaemolyticus; identical to SEQ ID NO: 2035
  Vibrio parahaemolyticus CFSAN025056

SEQ ID NO: 4009 - DNA, 31 bp, Vibrio parahaemolyticus; identical to SEQ ID NO: 1947
  Vibrio parahaemolyticus CFSAN025056

SEQ ID NO: 4010 - DNA, 31 bp, Vibrio parahaemolyticus; identical to SEQ ID NO: 1877
  Vibrio parahaemolyticus CFSAN025056

SEQ ID NO: 4011 - DNA, 31 bp, Vibrio parahaemolyticus; identical to SEQ ID NO: 2038
  Vibrio parahaemolyticus CFSAN025056

SEQ ID NO: 4012 - DNA, 28 bp, Vibrio parahaemolyticus
  Vibrio parahaemolyticus CFSAN018767
gtgaactgccgaataggtagctgataat

SEQ ID NO: 4013 - DNA, 28 bp, Vibrio parahaemolyticus
  Vibrio parahaemolyticus CFSAN018767
atgaactgccgaataggtagagaggagc

SEQ ID NO: 4014 - DNA, 28 bp, Vibrio parahaemolyticus
  Vibrio parahaemolyticus CFSAN018767
tcattactacttaaaagtagctgataac

SEQ ID NO: 4015 - DNA, 28 bp, Vibrio parahaemolyticus
  Vibrio parahaemolyticus CFSAN018767
gaatactgccgaacaggtaggaggctca

SEQ ID NO: 4016 - DNA, 31 bp, Vibrio parahaemolyticus; identical to SEQ ID NO: 1897
  Vibrio parahaemolyticus CFSAN018767

SEQ ID NO: 4017 - DNA, 31 bp, Vibrio parahaemolyticus; identical to SEQ ID NO: 1877
  Vibrio parahaemolyticus CFSAN018767

SEQ ID NO: 4018 - DNA, 31 bp, Vibrio parahaemolyticus; identical to SEQ ID NO: 1970
  Vibrio parahaemolyticus CFSAN018767

SEQ ID NO: 4019 - DNA, 28 bp, Vibrio parahaemolyticus
  Vibrio parahaemolyticus GCSL_R10
gtgaactgccgaataggtagctgataat

SEQ ID NO: 4020 - DNA, 28 bp, Vibrio parahaemolyticus
  Vibrio parahaemolyticus GCSL_R10
atgaactgccgaataggtagagaggagc

SEQ ID NO: 4021 - DNA, 28 bp, Vibrio parahaemolyticus
  Vibrio parahaemolyticus GCSL_R10
tcattactacttaaaagtagctgataac

SEQ ID NO: 4022 - DNA, 28 bp, Vibrio parahaemolyticus
  Vibrio parahaemolyticus GCSL_R10
gaatactgccgaacaggtaggaggctca

SEQ ID NO: 4023 - DNA, 31 bp, Vibrio parahaemolyticus; identical to SEQ ID NO: 1897
  Vibrio parahaemolyticus GCSL_R10

SEQ ID NO: 4024 - DNA, 31 bp, Vibrio parahaemolyticus; identical to SEQ ID NO: 1877
  Vibrio parahaemolyticus GCSL_R10

SEQ ID NO: 4025 - DNA, 31 bp, Vibrio parahaemolyticus; identical to SEQ ID NO: 1970
  Vibrio parahaemolyticus GCSL_R10

SEQ ID NO: 4026 - DNA, 28 bp, Vibrio parahaemolyticus
  Vibrio parahaemolyticus GCSL_R16
gtgaactgccgaataggtagctgataat

SEQ ID NO: 4027 - DNA, 28 bp, Vibrio parahaemolyticus
  Vibrio parahaemolyticus GCSL_R16
atgaactgccgaataggtagagaggagc

SEQ ID NO: 4028 - DNA, 28 bp, Vibrio parahaemolyticus
  Vibrio parahaemolyticus GCSL_R16
tcattactacttaaaagtagctgataac

SEQ ID NO: 4029 - DNA, 28 bp, Vibrio parahaemolyticus
  Vibrio parahaemolyticus GCSL_R16
gaatactgccgaacaggtaggaggctca

SEQ ID NO: 4030 - DNA, 31 bp, Vibrio parahaemolyticus; identical to SEQ ID NO: 1897
  Vibrio parahaemolyticus GCSL_R16

SEQ ID NO: 4031 - DNA, 31 bp, Vibrio parahaemolyticus; identical to SEQ ID NO: 1877
  Vibrio parahaemolyticus GCSL_R16

SEQ ID NO: 4032 - DNA, 31 bp, Vibrio parahaemolyticus; identical to SEQ ID NO: 1970
  Vibrio parahaemolyticus GCSL_R16

SEQ ID NO: 4033 - DNA, 28 bp, Vibrio parahaemolyticus
  Vibrio parahaemolyticus GCSL_R33
gttcaccgccgcataggcagctgataat

SEQ ID NO: 4034 - DNA, 28 bp, Vibrio parahaemolyticus
  Vibrio parahaemolyticus GCSL_R33
attcaccgccgtataggcagctgataat

SEQ ID NO: 4035 - DNA, 28 bp, Vibrio parahaemolyticus
  Vibrio parahaemolyticus GCSL_R33
gttcaccgccgcataggcagatttaact

SEQ ID NO: 4036 - DNA, 28 bp, Vibrio parahaemolyticus
  Vibrio parahaemolyticus GCSL_R33
cactactactgtaaaagtagctgataaa

SEQ ID NO: 4037 - DNA, 28 bp, Vibrio parahaemolyticus
  Vibrio parahaemolyticus GCSL_R33
aattactgctgaataagtagatatttat

SEQ ID NO: 4038 - DNA, 32 bp, Vibrio parahaemolyticus; identical to SEQ ID NO: 2381
  Vibrio parahaemolyticus GCSL_R33

SEQ ID NO: 4039 - DNA, 32 bp, Vibrio parahaemolyticus; identical to SEQ ID NO: 2382
  Vibrio parahaemolyticus GCSL_R33

SEQ ID NO: 4040 - DNA, 32 bp, Vibrio parahaemolyticus; identical to SEQ ID NO: 2383
  Vibrio parahaemolyticus GCSL_R33

SEQ ID NO: 4041 - DNA, 32 bp, Vibrio parahaemolyticus; identical to SEQ ID NO: 2384
  Vibrio parahaemolyticus GCSL_R33

SEQ ID NO: 4042 - DNA, 31 bp, Vibrio parahaemolyticus; identical to SEQ ID NO: 2385
  Vibrio parahaemolyticus GCSL_R33

SEQ ID NO: 4043 - DNA, 31 bp, Vibrio parahaemolyticus; identical to SEQ ID NO: 2386
  Vibrio parahaemolyticus GCSL_R33

SEQ ID NO: 4044 - DNA, 28 bp, Vibrio parahaemolyticus
  Vibrio parahaemolyticus GCSL_R76
gtgaactgccgaataggtagctgataat

SEQ ID NO: 4045 - DNA, 28 bp, Vibrio parahaemolyticus
  Vibrio parahaemolyticus GCSL_R76
atgaactgccgaataggtagagaggagc

SEQ ID NO: 4046 - DNA, 28 bp, Vibrio parahaemolyticus
  Vibrio parahaemolyticus GCSL_R76
tcattactacttaaaagtagctgataac

SEQ ID NO: 4047 - DNA, 28 bp, Vibrio parahaemolyticus
  Vibrio parahaemolyticus GCSL_R76
gaatactgccgaacaggtaggaggctca

SEQ ID NO: 4048 - DNA, 31 bp, Vibrio parahaemolyticus; identical to SEQ ID NO: 1897
  Vibrio parahaemolyticus GCSL_R76

SEQ ID NO: 4049 - DNA, 31 bp, Vibrio parahaemolyticus; identical to SEQ ID NO: 1877
  Vibrio parahaemolyticus GCSL_R76

SEQ ID NO: 4050 - DNA, 31 bp, Vibrio parahaemolyticus; identical to SEQ ID NO: 1878
  Vibrio parahaemolyticus GCSL_R76

SEQ ID NO: 4051 - DNA, 28 bp, Vibrio parahaemolyticus
  Vibrio parahaemolyticus GCSL_R144
gtgaactgccgaataggtagctgataat

SEQ ID NO: 4052 - DNA, 28 bp, Vibrio parahaemolyticus
  Vibrio parahaemolyticus GCSL_R144
atgaactgccgaataggtagagaggagc

SEQ ID NO: 4053 - DNA, 28 bp, Vibrio parahaemolyticus
  Vibrio parahaemolyticus GCSL_R144
tcattactacttaaaagtagctgataac

SEQ ID NO: 4054 - DNA, 28 bp, Vibrio parahaemolyticus
  Vibrio parahaemolyticus GCSL_R144
gaatactgccgaacaggtaggaggctca

SEQ ID NO: 4055 - DNA, 31 bp, Vibrio parahaemolyticus; identical to SEQ ID NO: 1897
  Vibrio parahaemolyticus GCSL_R144

SEQ ID NO: 4056 - DNA, 31 bp, Vibrio parahaemolyticus; identical to SEQ ID NO: 1877
  Vibrio parahaemolyticus GCSL_R144

SEQ ID NO: 4057 - DNA, 31 bp, Vibrio parahaemolyticus; identical to SEQ ID NO: 1970
  Vibrio parahaemolyticus GCSL_R144

SEQ ID NO: 4058 - DNA, 28 bp, Vibrio parahaemolyticus
  Vibrio parahaemolyticus CDC_K5433
gtgaactgccgaataggtagctgataat

SEQ ID NO: 4059 - DNA, 28 bp, Vibrio parahaemolyticus
  Vibrio parahaemolyticus CDC_K5433
gtgaactgccgcataggtagagaggatc

SEQ ID NO: 4060 - DNA, 28 bp, Vibrio parahaemolyticus
  Vibrio parahaemolyticus CDC_K5433
tcatcactactgaaaagtagctgataac

SEQ ID NO: 4061 - DNA, 28 bp, Vibrio parahaemolyticus
  Vibrio parahaemolyticus CDC_K5433
gaatactgccgaacaggtaggaggctca

SEQ ID NO: 4062 - DNA, 31 bp, Vibrio parahaemolyticus; identical to SEQ ID NO: 1876
  Vibrio parahaemolyticus CDC_K5433

SEQ ID NO: 4063 - DNA, 31 bp, Vibrio parahaemolyticus; identical to SEQ ID NO: 1877
  Vibrio parahaemolyticus CDC_K5433

SEQ ID NO: 4064 - DNA, 31 bp, Vibrio parahaemolyticus; identical to SEQ ID NO: 1878
  Vibrio parahaemolyticus CDC_K5433

SEQ ID NO: 4065 - DNA, 28 bp, Vibrio parahaemolyticus
  Vibrio parahaemolyticus CDC_K5306
gtgaactgccgaataggtagctgataat

SEQ ID NO: 4066 - DNA, 28 bp, Vibrio parahaemolyticus
  Vibrio parahaemolyticus CDC_K5306
atgaactgccgaataggtagagaggagc

SEQ ID NO: 4067 - DNA, 28 bp, Vibrio parahaemolyticus
  Vibrio parahaemolyticus CDC_K5306
tcattactacttaaaagtagctgataac

SEQ ID NO: 4068 - DNA, 28 bp, Vibrio parahaemolyticus
  Vibrio parahaemolyticus CDC_K5306
gaatactgccgaacaggtaggaggctca

SEQ ID NO: 4069 - DNA, 31 bp, Vibrio parahaemolyticus; identical to SEQ ID NO: 1897
  Vibrio parahaemolyticus CDC_K5306

SEQ ID NO: 4070 - DNA, 31 bp, Vibrio parahaemolyticus; identical to SEQ ID NO: 1877
  Vibrio parahaemolyticus CDC_K5306

SEQ ID NO: 4071 - DNA, 31 bp, Vibrio parahaemolyticus; identical to SEQ ID NO: 1878
  Vibrio parahaemolyticus CDC_K5306

SEQ ID NO: 4072 - DNA, 28 bp, Vibrio parahaemolyticus
  Vibrio parahaemolyticus CDC_K5429
gtgaactgccgaataggtagctgataat

SEQ ID NO: 4073 - DNA, 28 bp, Vibrio parahaemolyticus
  Vibrio parahaemolyticus CDC_K5429
gtgaactgccgcataggtagagaggatc

SEQ ID NO: 4074 - DNA, 28 bp, Vibrio parahaemolyticus
  Vibrio parahaemolyticus CDC_K5429
tcatcactactgaaaagtagctgataac

SEQ ID NO: 4075 - DNA, 28 bp, Vibrio parahaemolyticus
  Vibrio parahaemolyticus CDC_K5429
gaatactgccgaacaggtaggaggctca

SEQ ID NO: 4076 - DNA, 31 bp, Vibrio parahaemolyticus; identical to SEQ ID NO: 1876
  Vibrio parahaemolyticus CDC_K5429

SEQ ID NO: 4077 - DNA, 31 bp, Vibrio parahaemolyticus; identical to SEQ ID NO: 1877
  Vibrio parahaemolyticus CDC_K5429

SEQ ID NO: 4078 - DNA, 31 bp, Vibrio parahaemolyticus; identical to SEQ ID NO: 1878
  Vibrio parahaemolyticus CDC_K5429

SEQ ID NO: 4079 - DNA, 28 bp, Vibrio parahaemolyticus
  Vibrio parahaemolyticus CDC_K4558G
gtgaactgccgaataggtagctgataat

SEQ ID NO: 4080 - DNA, 28 bp, Vibrio parahaemolyticus
  Vibrio parahaemolyticus CDC_K4558G
gtgaactgccgcataggtagagaggatc

SEQ ID NO: 4081 - DNA, 31 bp, Vibrio parahaemolyticus; identical to SEQ ID NO: 1947
  Vibrio parahaemolyticus CDC_K4558G

SEQ ID NO: 4082 - DNA, 28 bp, Vibrio parahaemolyticus
  Vibrio parahaemolyticus CDC_K4763
gtgaactgccgaataggtagctgataat

SEQ ID NO: 4083 - DNA, 28 bp, Vibrio parahaemolyticus
  Vibrio parahaemolyticus CDC_K4763
atgaactgccgaataggtagagaggagc

SEQ ID NO: 4084 - DNA, 28 bp, Vibrio parahaemolyticus
  Vibrio parahaemolyticus CDC_K4763
tcattactacttaaaagtagctgataac

SEQ ID NO: 4085 - DNA, 28 bp, Vibrio parahaemolyticus
  Vibrio parahaemolyticus CDC_K4763
gaatactgccgaacaggtaggaggctca

SEQ ID NO: 4086 - DNA, 31 bp, Vibrio parahaemolyticus; identical to SEQ ID NO: 1897
  Vibrio parahaemolyticus CDC_K4763

SEQ ID NO: 4087 - DNA, 31 bp, Vibrio parahaemolyticus; identical to SEQ ID NO: 1877
  Vibrio parahaemolyticus CDC_K4763

SEQ ID NO: 4088 - DNA, 31 bp, Vibrio parahaemolyticus; identical to SEQ ID NO: 1970
  Vibrio parahaemolyticus CDC_K4763

SEQ ID NO: 4089 - DNA, 28 bp, Vibrio parahaemolyticus
  Vibrio parahaemolyticus CDC_K4775
gtgaactgccgaataggtagctgataat

SEQ ID NO: 4090 - DNA, 28 bp, Vibrio parahaemolyticus
  Vibrio parahaemolyticus CDC_K4775
gtgaactgccgcataggtagagagaatc

SEQ ID NO: 4091 - DNA, 28 bp, Vibrio parahaemolyticus
  Vibrio parahaemolyticus CDC_K4775
tcattactactaaaaagtagctgataac

SEQ ID NO: 4092 - DNA, 28 bp, Vibrio parahaemolyticus
  Vibrio parahaemolyticus CDC_K4775
gaatactgccgaacaggtaggaggctca

SEQ ID NO: 4093 - DNA, 32 bp, Vibrio parahaemolyticus; identical to SEQ ID NO: 1946
  Vibrio parahaemolyticus CDC_K4775

SEQ ID NO: 4094 - DNA, 31 bp, Vibrio parahaemolyticus; identical to SEQ ID NO: 1947
  Vibrio parahaemolyticus CDC_K4775

SEQ ID NO: 4095 - DNA, 31 bp, Vibrio parahaemolyticus; identical to SEQ ID NO: 1877
  Vibrio parahaemolyticus CDC_K4775

SEQ ID NO: 4096 - DNA, 31 bp, Vibrio parahaemolyticus; identical to SEQ ID NO: 1878
  Vibrio parahaemolyticus CDC_K4775

SEQ ID NO: 4097 - DNA, 28 bp, Vibrio parahaemolyticus
  Vibrio parahaemolyticus CDC_K5058
gtgaactgccgaataggtagctgataat

SEQ ID NO: 4098 - DNA, 28 bp, Vibrio parahaemolyticus
  Vibrio parahaemolyticus CDC_K5058
gtgaactgccgcataggtagagagaatc

SEQ ID NO: 4099 - DNA, 28 bp, Vibrio parahaemolyticus
  Vibrio parahaemolyticus CDC_K5058
tcattactactaaaaagtagctgataac

SEQ ID NO: 4100 - DNA, 28 bp, Vibrio parahaemolyticus
  Vibrio parahaemolyticus CDC_K5058
gaatactgccgaacaggtaggaggctca

SEQ ID NO: 4101 - DNA, 32 bp, Vibrio parahaemolyticus; identical to SEQ ID NO: 1946
  Vibrio parahaemolyticus CDC_K5058

SEQ ID NO: 4102 - DNA, 31 bp, Vibrio parahaemolyticus; identical to SEQ ID NO: 1947
  Vibrio parahaemolyticus CDC_K5058

SEQ ID NO: 4103 - DNA, 31 bp, Vibrio parahaemolyticus; identical to SEQ ID NO: 1877
  Vibrio parahaemolyticus CDC_K5058

SEQ ID NO: 4104 - DNA, 31 bp, Vibrio parahaemolyticus; identical to SEQ ID NO: 1878
  Vibrio parahaemolyticus CDC_K5058

SEQ ID NO: 4105 - DNA, 28 bp, Vibrio parahaemolyticus
  Vibrio parahaemolyticus CDC_K5278
gtgaactgccgaataggtagctgataat

SEQ ID NO: 4106 - DNA, 28 bp, Vibrio parahaemolyticus
  Vibrio parahaemolyticus CDC_K5278
gtgaactgccgcataggtagagaggatc

SEQ ID NO: 4107 - DNA, 28 bp, Vibrio parahaemolyticus
  Vibrio parahaemolyticus CDC_K5278
tcatcactactgaaaagtagctgataac

SEQ ID NO: 4108 - DNA, 28 bp, Vibrio parahaemolyticus
  Vibrio parahaemolyticus CDC_K5278
gaatactgccgaacaggtaggaggctca

SEQ ID NO: 4109 - DNA, 31 bp, Vibrio parahaemolyticus; identical to SEQ ID NO: 1876
  Vibrio parahaemolyticus CDC_K5278

SEQ ID NO: 4110 - DNA, 31 bp, Vibrio parahaemolyticus; identical to SEQ ID NO: 1877
  Vibrio parahaemolyticus CDC_K5278

SEQ ID NO: 4111 - DNA, 31 bp, Vibrio parahaemolyticus; identical to SEQ ID NO: 1878
  Vibrio parahaemolyticus CDC_K5278

SEQ ID NO: 4112 - DNA, 28 bp, Vibrio parahaemolyticus
  Vibrio parahaemolyticus CDC_K5345G
gtgaactgccgaataggtagctgataat

SEQ ID NO: 4113 - DNA, 28 bp, Vibrio parahaemolyticus
  Vibrio parahaemolyticus CDC_K5345G
gtgaactgccgcataggtagagaggatc

SEQ ID NO: 4114 - DNA, 28 bp, Vibrio parahaemolyticus
  Vibrio parahaemolyticus CDC_K5345G
tcatcactactgaaaagtagctgataac

SEQ ID NO: 4115 - DNA, 28 bp, Vibrio parahaemolyticus
  Vibrio parahaemolyticus CDC_K5345G
gaatactgccgaacaggtaggaggctca

SEQ ID NO: 4116 - DNA, 31 bp, Vibrio parahaemolyticus; identical to SEQ ID NO: 1876
  Vibrio parahaemolyticus CDC_K5345G

SEQ ID NO: 4117 - DNA, 31 bp, Vibrio parahaemolyticus; identical to SEQ ID NO: 1877
  Vibrio parahaemolyticus CDC_K5345G

SEQ ID NO: 4118 - DNA, 31 bp, Vibrio parahaemolyticus; identical to SEQ ID NO: 1878
  Vibrio parahaemolyticus CDC_K5345G

SEQ ID NO: 4119 - DNA, 28 bp, Vibrio parahaemolyticus
  Vibrio parahaemolyticus CDC_K5456
gtgaactgccgaataggtagctgataat

SEQ ID NO: 4120 - DNA, 28 bp, Vibrio parahaemolyticus
  Vibrio parahaemolyticus CDC_K5456
gtgaactgccgcataggtagagaggatc

SEQ ID NO: 4121 - DNA, 28 bp, Vibrio parahaemolyticus
  Vibrio parahaemolyticus CDC_K5456
tcatcactactgaaaagtagctgataac

SEQ ID NO: 4122 - DNA, 28 bp, Vibrio parahaemolyticus
  Vibrio parahaemolyticus CDC_K5456
gaatactgccgaacaggtaggaggctca

SEQ ID NO: 4123 - DNA, 31 bp, Vibrio parahaemolyticus; identical to SEQ ID NO: 1876
  Vibrio parahaemolyticus CDC_K5456

SEQ ID NO: 4124 - DNA, 31 bp, Vibrio parahaemolyticus; identical to SEQ ID NO: 1877
  Vibrio parahaemolyticus CDC_K5456

SEQ ID NO: 4125 - DNA, 31 bp, Vibrio parahaemolyticus; identical to SEQ ID NO: 1878
  Vibrio parahaemolyticus CDC_K5456

SEQ ID NO: 4126 - DNA, 28 bp, Vibrio parahaemolyticus
  Vibrio parahaemolyticus CDC_K5528
gtgaactgccgaataggtagctgataat

SEQ ID NO: 4127 - DNA, 28 bp, Vibrio parahaemolyticus
  Vibrio parahaemolyticus CDC_K5528
gtgaactgccgcataggtagagagaatc

SEQ ID NO: 4128 - DNA, 28 bp, Vibrio parahaemolyticus
  Vibrio parahaemolyticus CDC_K5528
tcattactactaaaaagtagctgataac

SEQ ID NO: 4129 - DNA, 28 bp, Vibrio parahaemolyticus
  Vibrio parahaemolyticus CDC_K5528
gaatactgccgaacaggtaggaggctca

SEQ ID NO: 4130 - DNA, 32 bp, Vibrio parahaemolyticus; identical to SEQ ID NO: 1946
  Vibrio parahaemolyticus CDC_K5528

SEQ ID NO: 4131 - DNA, 31 bp, Vibrio parahaemolyticus; identical to SEQ ID NO: 1947
  Vibrio parahaemolyticus CDC_K5528

SEQ ID NO: 4132 - DNA, 31 bp, Vibrio parahaemolyticus; identical to SEQ ID NO: 1877
  Vibrio parahaemolyticus CDC_K5528

SEQ ID NO: 4133 - DNA, 31 bp, Vibrio parahaemolyticus; identical to SEQ ID NO: 1878
  Vibrio parahaemolyticus CDC_K5528

SEQ ID NO: 4134 - DNA, 28 bp, Vibrio parahaemolyticus
  Vibrio parahaemolyticus CDC_K5620
gtgaactgccgaataggtagctgataat

SEQ ID NO: 4135 - DNA, 28 bp, Vibrio parahaemolyticus
  Vibrio parahaemolyticus CDC_K5620
gtgaactgccgcataggtagagaggatc

SEQ ID NO: 4136 - DNA, 28 bp, Vibrio parahaemolyticus
  Vibrio parahaemolyticus CDC_K5620
tcatcactactgaaaagtagctgataac

SEQ ID NO: 4137 - DNA, 28 bp, Vibrio parahaemolyticus
  Vibrio parahaemolyticus CDC_K5620
gaatactgccgaacaggtaggaggctca

SEQ ID NO: 4138 - DNA, 31 bp, Vibrio parahaemolyticus; identical to SEQ ID NO: 1876
  Vibrio parahaemolyticus CDC_K5620

SEQ ID NO: 4139 - DNA, 31 bp, Vibrio parahaemolyticus; identical to SEQ ID NO: 1877
  Vibrio parahaemolyticus CDC_K5620

SEQ ID NO: 4140 - DNA, 31 bp, Vibrio parahaemolyticus; identical to SEQ ID NO: 1970
  Vibrio parahaemolyticus CDC_K5620

SEQ ID NO: 4141 - DNA, 28 bp, Vibrio cholerae
  Vibrio cholerae VC22
gttcaccaccgcataggtagctgataat

SEQ ID NO: 4142 - DNA, 28 bp, Vibrio cholerae
  Vibrio cholerae VC22
gttcaccgccgcataggcagatttaact

SEQ ID NO: 4143 - DNA, 32 bp, Vibrio cholerae
  Vibrio cholerae VC22
gaaggacaaaatccaggatggcctgatgcaca

SEQ ID NO: 4144 - DNA, 28 bp, Vibrio parahaemolyticus
  Vibrio parahaemolyticus GIMxtfL71-2011.05
gtgaactgccgaataggtagctgataat

SEQ ID NO: 4145 - DNA, 28 bp, Vibrio parahaemolyticus
  Vibrio parahaemolyticus GIMxtfL71-2011.05
gtgaactgccgcataggtagagagaatc

SEQ ID NO: 4146 - DNA, 28 bp, Vibrio parahaemolyticus
  Vibrio parahaemolyticus GIMxtfL71-2011.05
tcattactactaaaaaggagctgataac

SEQ ID NO: 4147 - DNA, 28 bp, Vibrio parahaemolyticus
  Vibrio parahaemolyticus GIMxtfL71-2011.05
gaatactgccgaacaggtaggaggctca

SEQ ID NO: 4148 - DNA, 31 bp, Vibrio parahaemolyticus; identical to SEQ ID NO: 1947
  Vibrio parahaemolyticus GIMxtfL71-2011.05

SEQ ID NO: 4149 - DNA, 31 bp, Vibrio parahaemolyticus; identical to SEQ ID NO: 1877
  Vibrio parahaemolyticus GIMxtfL71-2011.05

SEQ ID NO: 4150 - DNA, 31 bp, Vibrio parahaemolyticus; identical to SEQ ID NO: 2038
  Vibrio parahaemolyticus GIMxtfL71-2011.05

SEQ ID NO: 4151 - DNA, 28 bp, Vibrio parahaemolyticus
  Vibrio parahaemolyticus PMA21.14
gtgaactgccgaataggtagctgataat

SEQ ID NO: 4152 - DNA, 28 bp, Vibrio parahaemolyticus
  Vibrio parahaemolyticus PMA21.14
gtgaactgccgcataggtagagaggatc

SEQ ID NO: 4153 - DNA, 28 bp, Vibrio parahaemolyticus
  Vibrio parahaemolyticus PMA21.14
tcatcactacttaaaagtagctgataac

SEQ ID NO: 4154 - DNA, 28 bp, Vibrio parahaemolyticus
  Vibrio parahaemolyticus PMA21.14
gaatactgccgaacaggtaggaggctca

SEQ ID NO: 4155 - DNA, 31 bp, Vibrio parahaemolyticus; identical to SEQ ID NO: 2018
  Vibrio parahaemolyticus PMA21.14

SEQ ID NO: 4156 - DNA, 31 bp, Vibrio parahaemolyticus; identical to SEQ ID NO: 1947
  Vibrio parahaemolyticus PMA21.14

SEQ ID NO: 4157 - DNA, 31 bp, Vibrio parahaemolyticus; identical to SEQ ID NO: 1877
  Vibrio parahaemolyticus PMA21.14

SEQ ID NO: 4158 - DNA, 31 bp, Vibrio parahaemolyticus; identical to SEQ ID NO: 2146
  Vibrio parahaemolyticus PMA21.14

SEQ ID NO: 4159 - DNA, 28 bp, Vibrio parahaemolyticus
  Vibrio parahaemolyticus CFSAN001616
gtgaactgccgaataggtagctgataat

SEQ ID NO: 4160 - DNA, 28 bp, Vibrio parahaemolyticus
  Vibrio parahaemolyticus CFSAN001616
gtgaactgccgcataggtagagaggatc

SEQ ID NO: 4161 - DNA, 28 bp, Vibrio parahaemolyticus
  Vibrio parahaemolyticus CFSAN001616
tcatcactactgaaaagtagctgataac

SEQ ID NO: 4162 - DNA, 28 bp, Vibrio parahaemolyticus
  Vibrio parahaemolyticus CFSAN001616
gaatactgccgaacaggtaggaggctca

SEQ ID NO: 4163 - DNA, 31 bp, Vibrio parahaemolyticus; identical to SEQ ID NO: 1876
  Vibrio parahaemolyticus CFSAN001616

SEQ ID NO: 4164 - DNA, 31 bp, Vibrio parahaemolyticus; identical to SEQ ID NO: 1877
  Vibrio parahaemolyticus CFSAN001616

SEQ ID NO: 4165 - DNA, 31 bp, Vibrio parahaemolyticus; identical to SEQ ID NO: 1878
  Vibrio parahaemolyticus CFSAN001616

SEQ ID NO: 4166 - DNA, 28 bp, Vibrio parahaemolyticus
  Vibrio parahaemolyticus HS-13-1_100
gtgaactgccgaataggtagctgataat

SEQ ID NO: 4167 - DNA, 28 bp, Vibrio parahaemolyticus
  Vibrio parahaemolyticus HS-13-1_100
atgaactgccgaataggtagagaggagc

SEQ ID NO: 4168 - DNA, 28 bp, Vibrio parahaemolyticus
  Vibrio parahaemolyticus HS-13-1_100
tcattactacttaaaagtagctgataac

SEQ ID NO: 4169 - DNA, 28 bp, Vibrio parahaemolyticus
  Vibrio parahaemolyticus HS-13-1_100
gaatactgccgaacaggtaggaggctca

SEQ ID NO: 4170 - DNA, 31 bp, Vibrio parahaemolyticus; identical to SEQ ID NO: 1897
  Vibrio parahaemolyticus HS-13-1_100

SEQ ID NO: 4171 - DNA, 31 bp, Vibrio parahaemolyticus; identical to SEQ ID NO: 1877
  Vibrio parahaemolyticus HS-13-1_100

SEQ ID NO: 4172 - DNA, 31 bp, Vibrio parahaemolyticus; identical to SEQ ID NO: 1878
  Vibrio parahaemolyticus HS-13-1_100

SEQ ID NO: 4173 - DNA, 28 bp, Vibrio parahaemolyticus
  Vibrio parahaemolyticus Vp47
gtgaactgccgaataggtagctgataat

SEQ ID NO: 4174 - DNA, 28 bp, Vibrio parahaemolyticus
  Vibrio parahaemolyticus Vp47
gtgaactgccgcataggtagagaggatc

SEQ ID NO: 4175 - DNA, 28 bp, Vibrio parahaemolyticus
  Vibrio parahaemolyticus Vp47
tcattactactgaaaagtagctgataac

SEQ ID NO: 4176 - DNA, 28 bp, Vibrio parahaemolyticus
  Vibrio parahaemolyticus Vp47
gaatactgccgaacaggtaggagactca

SEQ ID NO: 4177 - DNA, 32 bp, Vibrio parahaemolyticus
  Vibrio parahaemolyticus Vp47
tcgggctttctccctaattcgagacatggaaa

SEQ ID NO: 4178 - DNA, 31 bp, Vibrio parahaemolyticus
  Vibrio parahaemolyticus Vp47
aaatttacatctccagactcagctaaaaagc

SEQ ID NO: 4179 - DNA, 31 bp, Vibrio parahaemolyticus; identical to SEQ ID NO: 1970
  Vibrio parahaemolyticus Vp47

SEQ ID NO: 4180 - DNA, 28 bp, Vibrio parahaemolyticus
  Vibrio parahaemolyticus CFSAN001603
gtgaactgccgaataggtagctgataat

SEQ ID NO: 4181 - DNA, 28 bp, Vibrio parahaemolyticus
  Vibrio parahaemolyticus CFSAN001603
gtgaactgccgcataggtagagaggatc

SEQ ID NO: 4182 - DNA, 28 bp, Vibrio parahaemolyticus
  Vibrio parahaemolyticus CFSAN001603
tcatcactactgaaaagtagctgataac

SEQ ID NO: 4183 - DNA, 28 bp, Vibrio parahaemolyticus
  Vibrio parahaemolyticus CFSAN001603
gaatactgccgaacaggtaggaggctca

SEQ ID NO: 4184 - DNA, 31 bp, Vibrio parahaemolyticus; identical to SEQ ID NO: 1876
  Vibrio parahaemolyticus CFSAN001603

SEQ ID NO: 4185 - DNA, 31 bp, Vibrio parahaemolyticus; identical to SEQ ID NO: 1877
  Vibrio parahaemolyticus CFSAN001603

SEQ ID NO: 4186 - DNA, 31 bp, Vibrio parahaemolyticus; identical to SEQ ID NO: 1878
  Vibrio parahaemolyticus CFSAN001603

SEQ ID NO: 4187 - DNA, 28 bp, Vibrio parahaemolyticus
  Vibrio parahaemolyticus CFSAN001608
gtgaactgccgaataggtagctgataat

SEQ ID NO: 4188 - DNA, 28 bp, Vibrio parahaemolyticus
  Vibrio parahaemolyticus CFSAN001608
gtgaactgccgcataggtagagaggatc

SEQ ID NO: 4189 - DNA, 28 bp, Vibrio parahaemolyticus
  Vibrio parahaemolyticus CFSAN001608
tcatcactactgaaaagtagctgataac

SEQ ID NO: 4190 - DNA, 28 bp, Vibrio parahaemolyticus
  Vibrio parahaemolyticus CFSAN001608
gaatactgccgaacaggtaggaggctca

SEQ ID NO: 4191 - DNA, 31 bp, Vibrio parahaemolyticus; identical to SEQ ID NO: 1876
  Vibrio parahaemolyticus CFSAN001608

SEQ ID NO: 4192 - DNA, 31 bp, Vibrio parahaemolyticus; identical to SEQ ID NO: 1877
  Vibrio parahaemolyticus CFSAN001608

SEQ ID NO: 4193 - DNA, 31 bp, Vibrio parahaemolyticus; identical to SEQ ID NO: 1878
  Vibrio parahaemolyticus CFSAN001608

SEQ ID NO: 4194 - DNA, 28 bp, Vibrio parahaemolyticus
  Vibrio parahaemolyticus CFSAN001602
gtgaactgccgaataggtagctgataat

SEQ ID NO: 4195 - DNA, 28 bp, Vibrio parahaemolyticus
  Vibrio parahaemolyticus CFSAN001602
gtgaactgccgcataggtagagaggatc

SEQ ID NO: 4196 - DNA, 28 bp, Vibrio parahaemolyticus
  Vibrio parahaemolyticus CFSAN001602
tcatcactactgaaaagtagctgataac

SEQ ID NO: 4197 - DNA, 28 bp, Vibrio parahaemolyticus
  Vibrio parahaemolyticus CFSAN001602
gaatactgccgaacaggtaggaggctca

SEQ ID NO: 4198 - DNA, 31 bp, Vibrio parahaemolyticus; identical to SEQ ID NO: 1876
  Vibrio parahaemolyticus CFSAN001602

SEQ ID NO: 4199 - DNA, 31 bp, Vibrio parahaemolyticus; identical to SEQ ID NO: 1877
  Vibrio parahaemolyticus CFSAN001602

SEQ ID NO: 4200 - DNA, 31 bp, Vibrio parahaemolyticus; identical to SEQ ID NO: 1878
  Vibrio parahaemolyticus CFSAN001602

SEQ ID NO: 4201 - DNA, 28 bp, Vibrio parahaemolyticus
  Vibrio parahaemolyticus CFSAN001600
gtgaactgccgaataggtagctgataat

SEQ ID NO: 4202 - DNA, 28 bp, Vibrio parahaemolyticus
  Vibrio parahaemolyticus CFSAN001600
gtgaactgccgcataggtagagaggatc

SEQ ID NO: 4203 - DNA, 28 bp, Vibrio parahaemolyticus
  Vibrio parahaemolyticus CFSAN001600
tcatcactactgaaaagtagctgataac

SEQ ID NO: 4204 - DNA, 28 bp, Vibrio parahaemolyticus
  Vibrio parahaemolyticus CFSAN001600
gaatactgccgaacaggtaggaggctca

SEQ ID NO: 4205 - DNA, 31 bp, Vibrio parahaemolyticus; identical to SEQ ID NO: 1876
  Vibrio parahaemolyticus CFSAN001600

SEQ ID NO: 4206 - DNA, 31 bp, Vibrio parahaemolyticus; identical to SEQ ID NO: 1877
  Vibrio parahaemolyticus CFSAN001600

SEQ ID NO: 4207 - DNA, 31 bp, Vibrio parahaemolyticus; identical to SEQ ID NO: 1878
  Vibrio parahaemolyticus CFSAN001600

SEQ ID NO: 4208 - DNA, 28 bp, Vibrio parahaemolyticus
  Vibrio parahaemolyticus CFSAN018770
gtgaactgccgaataggtagctgataat

SEQ ID NO: 4209 - DNA, 28 bp, Vibrio parahaemolyticus
  Vibrio parahaemolyticus CFSAN018770
gtgaactgccgcataggtagagaggatc

SEQ ID NO: 4210 - DNA, 28 bp, Vibrio parahaemolyticus
  Vibrio parahaemolyticus CFSAN018770
tcatcactactgaaaagtagctgataac

SEQ ID NO: 4211 - DNA, 28 bp, Vibrio parahaemolyticus
  Vibrio parahaemolyticus CFSAN018770
gaatactgccgaacaggtaggaggctca

SEQ ID NO: 4212 - DNA, 31 bp, Vibrio parahaemolyticus; identical to SEQ ID NO: 1876
  Vibrio parahaemolyticus CFSAN018770

SEQ ID NO: 4213 - DNA, 31 bp, Vibrio parahaemolyticus; identical to SEQ ID NO: 1877
  Vibrio parahaemolyticus CFSAN018770

SEQ ID NO: 4214 - DNA, 31 bp, Vibrio parahaemolyticus; identical to SEQ ID NO: 1878
  Vibrio parahaemolyticus CFSAN018770

SEQ ID NO: 4215 - DNA, 28 bp, Vibrio parahaemolyticus
  Vibrio parahaemolyticus CFSAN022330
gtgaactgccgaataggtagctgataat

SEQ ID NO: 4216 - DNA, 28 bp, Vibrio parahaemolyticus
  Vibrio parahaemolyticus CFSAN022330
gtgaactgccgcataggtagagaggatc

SEQ ID NO: 4217 - DNA, 28 bp, Vibrio parahaemolyticus
  Vibrio parahaemolyticus CFSAN022330
tcatcactactgaaaagtagctgataac

SEQ ID NO: 4218 - DNA, 28 bp, Vibrio parahaemolyticus
  Vibrio parahaemolyticus CFSAN022330
gaatactgccgaacaggtaggaggctca

SEQ ID NO: 4219 - DNA, 31 bp, Vibrio parahaemolyticus; identical to SEQ ID NO: 1876
  Vibrio parahaemolyticus CFSAN022330

SEQ ID NO: 4220 - DNA, 31 bp, Vibrio parahaemolyticus; identical to SEQ ID NO: 1877
  Vibrio parahaemolyticus CFSAN022330

SEQ ID NO: 4221 - DNA, 31 bp, Vibrio parahaemolyticus; identical to SEQ ID NO: 1878
  Vibrio parahaemolyticus CFSAN022330

SEQ ID NO: 4222 - DNA, 28 bp, Vibrio parahaemolyticus
  Vibrio parahaemolyticus CFSAN022331
gtgaactgccgaataggtagctgataat

SEQ ID NO: 4223 - DNA, 28 bp, Vibrio parahaemolyticus
  Vibrio parahaemolyticus CFSAN022331
gtgaactgccgcataggtagagaggatc

SEQ ID NO: 4224 - DNA, 28 bp, Vibrio parahaemolyticus
  Vibrio parahaemolyticus CFSAN022331
tcatcactactgaaaagtagctgataac

SEQ ID NO: 4225 - DNA, 28 bp, Vibrio parahaemolyticus
  Vibrio parahaemolyticus CFSAN022331
gaatactgccgaacaggtaggaggctca

SEQ ID NO: 4226 - DNA, 31 bp, Vibrio parahaemolyticus; identical to SEQ ID NO: 1876
  Vibrio parahaemolyticus CFSAN022331

SEQ ID NO: 4227 - DNA, 31 bp, Vibrio parahaemolyticus; identical to SEQ ID NO: 1877
  Vibrio parahaemolyticus CFSAN022331

SEQ ID NO: 4228 - DNA, 31 bp, Vibrio parahaemolyticus; identical to SEQ ID NO: 1878
  Vibrio parahaemolyticus CFSAN022331

SEQ ID NO: 4229 - DNA, 28 bp, Vibrio parahaemolyticus
  Vibrio parahaemolyticus CFSAN022336
gtgaactgccgaataggtagctgataat

SEQ ID NO: 4230 - DNA, 28 bp, Vibrio parahaemolyticus
  Vibrio parahaemolyticus CFSAN022336
gtgaactgccgcataggtagagaggatc

SEQ ID NO: 4231 - DNA, 28 bp, Vibrio parahaemolyticus
  Vibrio parahaemolyticus CFSAN022336
tcatcactactgaaaagtagctgataac

SEQ ID NO: 4232 - DNA, 28 bp, Vibrio parahaemolyticus
  Vibrio parahaemolyticus CFSAN022336
gaatactgccgaacaggtaggaggctca

SEQ ID NO: 4233 - DNA, 31 bp, Vibrio parahaemolyticus; identical to SEQ ID NO: 1876
  Vibrio parahaemolyticus CFSAN022336

SEQ ID NO: 4234 - DNA, 31 bp, Vibrio parahaemolyticus; identical to SEQ ID NO: 1877
  Vibrio parahaemolyticus CFSAN022336

SEQ ID NO: 4235 - DNA, 31 bp, Vibrio parahaemolyticus; identical to SEQ ID NO: 1878
  Vibrio parahaemolyticus CFSAN022336

SEQ ID NO: 4236 - DNA, 28 bp, Vibrio parahaemolyticus
  Vibrio parahaemolyticus MAVP39
gtgaactgccgaataggtagctgataat

SEQ ID NO: 4237 - DNA, 28 bp, Vibrio parahaemolyticus
  Vibrio parahaemolyticus MAVP39
gtgaactgccgcataggtagagaggatc

SEQ ID NO: 4238 - DNA, 28 bp, Vibrio parahaemolyticus
  Vibrio parahaemolyticus MAVP39
tcatcactactgaaaagtagctgataac

SEQ ID NO: 4239 - DNA, 28 bp, Vibrio parahaemolyticus
  Vibrio parahaemolyticus MAVP39
gaatactgccgaacaggtaggaggctca

SEQ ID NO: 4240 - DNA, 31 bp, Vibrio parahaemolyticus; identical to SEQ ID NO: 1876
  Vibrio parahaemolyticus MAVP39

SEQ ID NO: 4241 - DNA, 31 bp, Vibrio parahaemolyticus; identical to SEQ ID NO: 1877
  Vibrio parahaemolyticus MAVP39

SEQ ID NO: 4242 - DNA, 31 bp, Vibrio parahaemolyticus; identical to SEQ ID NO: 1878
  Vibrio parahaemolyticus MAVP39

SEQ ID NO: 4243 - DNA, 28 bp, Vibrio parahaemolyticus
  Vibrio parahaemolyticus MAVP-Q
gtgaactgccgaataggtagctgataat

SEQ ID NO: 4244 - DNA, 28 bp, Vibrio parahaemolyticus
  Vibrio parahaemolyticus MAVP-Q
gtgaactgccgcataggtagagaggatc

SEQ ID NO: 4245 - DNA, 28 bp, Vibrio parahaemolyticus
  Vibrio parahaemolyticus MAVP-Q
tcatcactactgaaaagtagctgataac

SEQ ID NO: 4246 - DNA, 28 bp, Vibrio parahaemolyticus
  Vibrio parahaemolyticus MAVP-Q
gaatactgccgaacaggtaggaggctca

SEQ ID NO: 4247 - DNA, 31 bp, Vibrio parahaemolyticus; identical to SEQ ID NO: 1876
  Vibrio parahaemolyticus MAVP-Q

SEQ ID NO: 4248 - DNA, 31 bp, Vibrio parahaemolyticus; identical to SEQ ID NO: 1877
  Vibrio parahaemolyticus MAVP-Q

SEQ ID NO: 4249 - DNA, 31 bp, Vibrio parahaemolyticus; identical to SEQ ID NO: 1878
  Vibrio parahaemolyticus MAVP-Q

SEQ ID NO: 4250 - DNA, 28 bp, Vibrio parahaemolyticus
  Vibrio parahaemolyticus G3578
gtgaactgccgaataggtagctgataat

SEQ ID NO: 4251 - DNA, 28 bp, Vibrio parahaemolyticus
  Vibrio parahaemolyticus G3578
atgaactgccgaataggtagagaggagc

SEQ ID NO: 4252 - DNA, 28 bp, Vibrio parahaemolyticus
  Vibrio parahaemolyticus G3578
tcattactacttaaaagtagctgataac

SEQ ID NO: 4253 - DNA, 28 bp, Vibrio parahaemolyticus
  Vibrio parahaemolyticus G3578
gaatactgccgaacaggtaggaggctca

SEQ ID NO: 4254 - DNA, 31 bp, Vibrio parahaemolyticus; identical to SEQ ID NO: 1897
  Vibrio parahaemolyticus G3578

SEQ ID NO: 4255 - DNA, 31 bp, Vibrio parahaemolyticus; identical to SEQ ID NO: 1877
  Vibrio parahaemolyticus G3578

SEQ ID NO: 4256 - DNA, 31 bp, Vibrio parahaemolyticus; identical to SEQ ID NO: 1970
  Vibrio parahaemolyticus G3578

SEQ ID NO: 4257 - DNA, 28 bp, Vibrio parahaemolyticus
  Vibrio parahaemolyticus MEVP14
gtgaactgccgaataggtagctgataat

SEQ ID NO: 4258 - DNA, 28 bp, Vibrio parahaemolyticus
  Vibrio parahaemolyticus MEVP14
atgaactgccgaataggtagagaggagc

SEQ ID NO: 4259 - DNA, 28 bp, Vibrio parahaemolyticus
  Vibrio parahaemolyticus MEVP14
tcattactacttaaaagtagctgataac

SEQ ID NO: 4260 - DNA, 28 bp, Vibrio parahaemolyticus
  Vibrio parahaemolyticus MEVP14
gaatactgccgaacaggtaggaggctca

SEQ ID NO: 4261 - DNA, 31 bp, Vibrio parahaemolyticus; identical to SEQ ID NO: 1897
  Vibrio parahaemolyticus MEVP14

SEQ ID NO: 4262 - DNA, 31 bp, Vibrio parahaemolyticus; identical to SEQ ID NO: 1877
  Vibrio parahaemolyticus MEVP14

SEQ ID NO: 4263 - DNA, 31 bp, Vibrio parahaemolyticus; identical to SEQ ID NO: 1878
  Vibrio parahaemolyticus MEVP14

SEQ ID NO: 4264 - DNA, 28 bp, Vibrio parahaemolyticus
  Vibrio parahaemolyticus CTVP34C
gtgaactgccgaataggtagctgataat

SEQ ID NO: 4265 - DNA, 28 bp, Vibrio parahaemolyticus
  Vibrio parahaemolyticus CTVP34C
gtgaactgccgcataggtagagaggatc

SEQ ID NO: 4266 - DNA, 28 bp, Vibrio parahaemolyticus
  Vibrio parahaemolyticus CTVP34C
tcatcactactgaaaagtagctgataac

SEQ ID NO: 4267 - DNA, 28 bp, Vibrio parahaemolyticus
  Vibrio parahaemolyticus CTVP34C
gaatactgccgaacaggtaggaggctca

SEQ ID NO: 4268 - DNA, 31 bp, Vibrio parahaemolyticus; identical to SEQ ID NO: 1876
  Vibrio parahaemolyticus CTVP34C

SEQ ID NO: 4269 - DNA, 31 bp, Vibrio parahaemolyticus; identical to SEQ ID NO: 1877
  Vibrio parahaemolyticus CTVP34C

SEQ ID NO: 4270 - DNA, 31 bp, Vibrio parahaemolyticus; identical to SEQ ID NO: 1878
  Vibrio parahaemolyticus CTVP34C

SEQ ID NO: 4271 - DNA, 28 bp, Vibrio parahaemolyticus
  Vibrio parahaemolyticus CTVP27C
gtgaactgccgaataggtagctgataat

SEQ ID NO: 4272 - DNA, 28 bp, Vibrio parahaemolyticus
  Vibrio parahaemolyticus CTVP27C
gtgaactgccgcataggtagagaggatc

SEQ ID NO: 4273 - DNA, 28 bp, Vibrio parahaemolyticus
  Vibrio parahaemolyticus CTVP27C
tcatcactactgaaaagtagctgataac

SEQ ID NO: 4274 - DNA, 28 bp, Vibrio parahaemolyticus
  Vibrio parahaemolyticus CTVP27C
gaatactgccgaacaggtaggaggctca

SEQ ID NO: 4275 - DNA, 31 bp, Vibrio parahaemolyticus; identical to SEQ ID NO: 1876
  Vibrio parahaemolyticus CTVP27C

SEQ ID NO: 4276 - DNA, 31 bp, Vibrio parahaemolyticus; identical to SEQ ID NO: 1877
  Vibrio parahaemolyticus CTVP27C

SEQ ID NO: 4277 - DNA, 31 bp, Vibrio parahaemolyticus; identical to SEQ ID NO: 1878
  Vibrio parahaemolyticus CTVP27C

SEQ ID NO: 4278 - DNA, 28 bp, Vibrio parahaemolyticus
  Vibrio parahaemolyticus VPD14
gtgaactgccgaataggtagctgataat

SEQ ID NO: 4279 - DNA, 28 bp, Vibrio parahaemolyticus
  Vibrio parahaemolyticus VPD14
gtgaactgccgcataggtagagagaatc

SEQ ID NO: 4280 - DNA, 28 bp, Vibrio parahaemolyticus
  Vibrio parahaemolyticus VPD14
tcattactactaaaaagtagctgataac

SEQ ID NO: 4281 - DNA, 28 bp, Vibrio parahaemolyticus
  Vibrio parahaemolyticus VPD14
gaatactgccgaacaggtaggaggctca

SEQ ID NO: 4282 - DNA, 32 bp, Vibrio parahaemolyticus; identical to SEQ ID NO: 1946
  Vibrio parahaemolyticus VPD14

SEQ ID NO: 4283 - DNA, 31 bp, Vibrio parahaemolyticus; identical to SEQ ID NO: 1947
  Vibrio parahaemolyticus VPD14

SEQ ID NO: 4284 - DNA, 31 bp, Vibrio parahaemolyticus; identical to SEQ ID NO: 1877
  Vibrio parahaemolyticus VPD14

SEQ ID NO: 4285 - DNA, 31 bp, Vibrio parahaemolyticus; identical to SEQ ID NO: 1878
  Vibrio parahaemolyticus VPD14

SEQ ID NO: 4286 - DNA, 28 bp, Vibrio parahaemolyticus
  Vibrio parahaemolyticus B-265
gtgaactgccgaataggtagctgataat

SEQ ID NO: 4287 - DNA, 28 bp, Vibrio parahaemolyticus
  Vibrio parahaemolyticus B-265
gtgaactgccgcataggtagagagaatc

SEQ ID NO: 4288 - DNA, 28 bp, Vibrio parahaemolyticus
  Vibrio parahaemolyticus B-265
tcattactactaaaaagtagctgataac

SEQ ID NO: 4289 - DNA, 28 bp, Vibrio parahaemolyticus
  Vibrio parahaemolyticus B-265
gaatactgccgaacaggtaggaggctca

SEQ ID NO: 4290 - DNA, 32 bp, Vibrio parahaemolyticus; identical to SEQ ID NO: 1946
  Vibrio parahaemolyticus B-265

SEQ ID NO: 4291 - DNA, 31 bp, Vibrio parahaemolyticus; identical to SEQ ID NO: 1947
  Vibrio parahaemolyticus B-265

SEQ ID NO: 4292 - DNA, 31 bp, Vibrio parahaemolyticus; identical to SEQ ID NO: 1877
  Vibrio parahaemolyticus B-265

SEQ ID NO: 4293 - DNA, 31 bp, Vibrio parahaemolyticus; identical to SEQ ID NO: 1878
  Vibrio parahaemolyticus B-265

SEQ ID NO: 4294 - DNA, 28 bp, Vibrio parahaemolyticus
  Vibrio parahaemolyticus GCSL_R125
gtgaactgccgaataggtagctgataat

SEQ ID NO: 4295 - DNA, 28 bp, Vibrio parahaemolyticus
  Vibrio parahaemolyticus GCSL_R125
gtgaactgccgcataggtagagaggagc

SEQ ID NO: 4296 - DNA, 28 bp, Vibrio parahaemolyticus
  Vibrio parahaemolyticus GCSL_R125
tcattactactgaaaagtagctgataac

SEQ ID NO: 4297 - DNA, 28 bp, Vibrio parahaemolyticus
  Vibrio parahaemolyticus GCSL_R125
gagtactgccgaacaggtaggaggctca

SEQ ID NO: 4298 - DNA, 32 bp, Vibrio parahaemolyticus
  Vibrio parahaemolyticus GCSL_R125
agtctcatagtgaatactcaaagtgatattga

SEQ ID NO: 4299 - DNA, 31 bp, Vibrio parahaemolyticus; identical to SEQ ID NO: 1877
  Vibrio parahaemolyticus GCSL_R125

SEQ ID NO: 4300 - DNA, 31 bp, Vibrio parahaemolyticus; identical to SEQ ID NO: 1970
  Vibrio parahaemolyticus GCSL_R125

SEQ ID NO: 4301 - DNA, 28 bp, Vibrio parahaemolyticus
  Vibrio parahaemolyticus CDC_K4637W
gtgaactgccgaataggtagctgataat

SEQ ID NO: 4302 - DNA, 28 bp, Vibrio parahaemolyticus
  Vibrio parahaemolyticus CDC_K4637W
gtgaactgccgcataggtagagagaatc

SEQ ID NO: 4303 - DNA, 28 bp, Vibrio parahaemolyticus
  Vibrio parahaemolyticus CDC_K4637W
tcattactactaaaaagtagctgataac

SEQ ID NO: 4304 - DNA, 28 bp, Vibrio parahaemolyticus
  Vibrio parahaemolyticus CDC_K4637W
gaatactgccgaacaggtaggaggctca

SEQ ID NO: 4305 - DNA, 32 bp, Vibrio parahaemolyticus; identical to SEQ ID NO: 1946
  Vibrio parahaemolyticus CDC_K4637W

SEQ ID NO: 4306 - DNA, 31 bp, Vibrio parahaemolyticus; identical to SEQ ID NO: 1947
  Vibrio parahaemolyticus CDC_K4637W

SEQ ID NO: 4307 - DNA, 31 bp, Vibrio parahaemolyticus; identical to SEQ ID NO: 1877
  Vibrio parahaemolyticus CDC_K4637W

SEQ ID NO: 4308 - DNA, 31 bp, Vibrio parahaemolyticus; identical to SEQ ID NO: 1878
  Vibrio parahaemolyticus CDC_K4637W

SEQ ID NO: 4309 - DNA, 28 bp, Vibrio cholerae
  Vibrio cholerae N2797
gtgaactgccgagtaggtagctgataac

SEQ ID NO: 4310 - DNA, 28 bp, Vibrio cholerae
  Vibrio cholerae N2797
gttaactgccgaataggtagctgataat

SEQ ID NO: 4311 - DNA, 28 bp, Vibrio cholerae
  Vibrio cholerae N2797
gtgaactgccgagtaggcagagggcatc

SEQ ID NO: 4312 - DNA, 28 bp, Vibrio cholerae
  Vibrio cholerae N2797
tcattactactgcaaagtagctgataac

SEQ ID NO: 4313 - DNA, 28 bp, Vibrio cholerae
  Vibrio cholerae N2797
ctttactgctgaataagtagataactac

SEQ ID NO: 4314 - DNA, 32 bp, Vibrio cholerae
  Vibrio cholerae N2797
ttaaagatccaagttttgtctatgtcctcaat

SEQ ID NO: 4315 - DNA, 32 bp, Vibrio cholerae
  Vibrio cholerae N2797
atccaacgtgctttagggcactctgaaccatc

SEQ ID NO: 4316 - DNA, 32 bp, Vibrio cholerae; identical to SEQ ID NO: 3019
  Vibrio cholerae N2797

SEQ ID NO: 4317 - DNA, 32 bp, Vibrio cholerae; identical to SEQ ID NO: 3472
  Vibrio cholerae N2797

SEQ ID NO: 4318 - DNA, 28 bp, Vibrio parahaemolyticus
  Vibrio parahaemolyticus CDC_K5125
gtgaactgccgaataggtagctgataat

SEQ ID NO: 4319 - DNA, 28 bp, Vibrio parahaemolyticus
  Vibrio parahaemolyticus CDC_K5125
gtgaactgccgcataggtagagaggatc

SEQ ID NO: 4320 - DNA, 28 bp, Vibrio parahaemolyticus
  Vibrio parahaemolyticus CDC_K5125
tcattactacttaaaagtagctgataac

SEQ ID NO: 4321 - DNA, 28 bp, Vibrio parahaemolyticus
  Vibrio parahaemolyticus CDC_K5125
gaatactgccgaacaggtaggaggctca

SEQ ID NO: 4322 - DNA, 31 bp, Vibrio parahaemolyticus; identical to SEQ ID NO: 2018
  Vibrio parahaemolyticus CDC_K5125

SEQ ID NO: 4323 - DNA, 31 bp, Vibrio parahaemolyticus; identical to SEQ ID NO: 1947
  Vibrio parahaemolyticus CDC_K5125

SEQ ID NO: 4324 - DNA, 31 bp, Vibrio parahaemolyticus; identical to SEQ ID NO: 1877
  Vibrio parahaemolyticus CDC_K5125

SEQ ID NO: 4325 - DNA, 31 bp, Vibrio parahaemolyticus; identical to SEQ ID NO: 1878
  Vibrio parahaemolyticus CDC_K5125

SEQ ID NO: 4326 - DNA, 28 bp, Vibrio parahaemolyticus
  Vibrio parahaemolyticus CFSAN001595
gtgaactgccgaataggtagctgataat

SEQ ID NO: 4327 - DNA, 28 bp, Vibrio parahaemolyticus
  Vibrio parahaemolyticus CFSAN001595
gtgaactgccgcataggtagagagaatc

SEQ ID NO: 4328 - DNA, 28 bp, Vibrio parahaemolyticus
  Vibrio parahaemolyticus CFSAN001595
tcattactactaaaaagtagctgataac

SEQ ID NO: 4329 - DNA, 28 bp, Vibrio parahaemolyticus
  Vibrio parahaemolyticus CFSAN001595
gaatactgccgaacaggtaggaggctca

SEQ ID NO: 4330 - DNA, 32 bp, Vibrio parahaemolyticus; identical to SEQ ID NO: 2035
  Vibrio parahaemolyticus CFSAN001595

SEQ ID NO: 4331 - DNA, 31 bp, Vibrio parahaemolyticus; identical to SEQ ID NO: 1947
  Vibrio parahaemolyticus CFSAN001595

SEQ ID NO: 4332 - DNA, 31 bp, Vibrio parahaemolyticus; identical to SEQ ID NO: 1877
  Vibrio parahaemolyticus CFSAN001595

SEQ ID NO: 4333 - DNA, 31 bp, Vibrio parahaemolyticus; identical to SEQ ID NO: 1878
  Vibrio parahaemolyticus CFSAN001595

SEQ ID NO: 4334 - DNA, 28 bp, Vibrio parahaemolyticus
  Vibrio parahaemolyticus 09-3216_100
gtgaactgccgaataggtagctgataat

SEQ ID NO: 4335 - DNA, 28 bp, Vibrio parahaemolyticus
  Vibrio parahaemolyticus 09-3216_100
gtgaactgccgcataggtagagaggatc

SEQ ID NO: 4336 - DNA, 28 bp, Vibrio parahaemolyticus
  Vibrio parahaemolyticus 09-3216_100
tcatcactactgaaaagtagctgataac

SEQ ID NO: 4337 - DNA, 28 bp, Vibrio parahaemolyticus
  Vibrio parahaemolyticus 09-3216_100
gaatactgccgaacaggtaggaggctca

SEQ ID NO: 4338 - DNA, 31 bp, Vibrio parahaemolyticus; identical to SEQ ID NO: 1876
  Vibrio parahaemolyticus 09-3216_100

SEQ ID NO: 4339 - DNA, 31 bp, Vibrio parahaemolyticus; identical to SEQ ID NO: 1877
  Vibrio parahaemolyticus 09-3216_100

SEQ ID NO: 4340 - DNA, 31 bp, Vibrio parahaemolyticus; identical to SEQ ID NO: 1878
  Vibrio parahaemolyticus 09-3216_100

SEQ ID NO: 4341 - DNA, 28 bp, Vibrio natriegens
  Vibrio natriegens CCUG 16374
gtgaactgccgcataggtagctgataat

SEQ ID NO: 4342 - DNA, 28 bp, Vibrio natriegens
  Vibrio natriegens CCUG 16374
gtgaactgccgcaaaggtagctgataat

SEQ ID NO: 4343 - DNA, 28 bp, Vibrio natriegens
  Vibrio natriegens CCUG 16374
gtgaactgccgtataggtagagaggatc

SEQ ID NO: 4344 - DNA, 28 bp, Vibrio natriegens
  Vibrio natriegens CCUG 16374
tcaatactactgaaaagtagctgataac

SEQ ID NO: 4345 - DNA, 28 bp, Vibrio natriegens
  Vibrio natriegens CCUG 16374
gaatactgccgagcaggtaggtggtttg

SEQ ID NO: 4346 - DNA, 32 bp, Vibrio natriegens
  Vibrio natriegens CCUG 16374
ttaggtaattcaatcatcccagagatagcaaa

SEQ ID NO: 4347 - DNA, 32 bp, Vibrio natriegens
  Vibrio natriegens CCUG 16374
gatgaggcaagagcaagaaaccgtagagtaga

SEQ ID NO: 4348 - DNA, 32 bp, Vibrio natriegens
  Vibrio natriegens CCUG 16374
tgttcataatcttcttcaagagcaaccacgat

SEQ ID NO: 4349 - DNA, 31 bp, Vibrio natriegens
  Vibrio natriegens CCUG 16374
aaatttacatctccaggctctgccaaaaagc

SEQ ID NO: 4350 - DNA, 31 bp, Vibrio natriegens
  Vibrio natriegens CCUG 16374
aaatttacgtcgcctggttctgctaaaaagc

SEQ ID NO: 4351 - DNA, 28 bp, Vibrio parahaemolyticus
  Vibrio parahaemolyticus HZ18-100
gtgaactgccgaataggtagctgataat

SEQ ID NO: 4352 - DNA, 28 bp, Vibrio parahaemolyticus
  Vibrio parahaemolyticus HZ18-100
gtgaactgccgcataggtagagagaatc

SEQ ID NO: 4353 - DNA, 28 bp, Vibrio parahaemolyticus
  Vibrio parahaemolyticus HZ18-100
tcattactactaaaaagtagctgataac

SEQ ID NO: 4354 - DNA, 28 bp, Vibrio parahaemolyticus
  Vibrio parahaemolyticus HZ18-100
gaatactgccgaacaggtaggaggctca

SEQ ID NO: 4355 - DNA, 32 bp, Vibrio parahaemolyticus; identical to SEQ ID NO: 2034
  Vibrio parahaemolyticus HZ18-100

SEQ ID NO: 4356 - DNA, 32 bp, Vibrio parahaemolyticus; identical to SEQ ID NO: 2035
  Vibrio parahaemolyticus HZ18-100

SEQ ID NO: 4357 - DNA, 31 bp, Vibrio parahaemolyticus; identical to SEQ ID NO: 1947
  Vibrio parahaemolyticus HZ18-100

SEQ ID NO: 4358 - DNA, 31 bp, Vibrio parahaemolyticus; identical to SEQ ID NO: 1877
  Vibrio parahaemolyticus HZ18-100

SEQ ID NO: 4359 - DNA, 31 bp, Vibrio parahaemolyticus; identical to SEQ ID NO: 1878
  Vibrio parahaemolyticus HZ18-100

SEQ ID NO: 4360 - DNA, 28 bp, Vibrio parahaemolyticus
  Vibrio parahaemolyticus CFSAN006135
gtgaactgccgaataggtagctgataat

SEQ ID NO: 4361 - DNA, 28 bp, Vibrio parahaemolyticus
  Vibrio parahaemolyticus CFSAN006135
gtgaactgccgcataggtagagaggatc

SEQ ID NO: 4362 - DNA, 28 bp, Vibrio parahaemolyticus
  Vibrio parahaemolyticus CFSAN006135
tcatcactactgaaaagtagctgataac

SEQ ID NO: 4363 - DNA, 28 bp, Vibrio parahaemolyticus
  Vibrio parahaemolyticus CFSAN006135
gaatactgccgaacaggtaggaggctca

SEQ ID NO: 4364 - DNA, 31 bp, Vibrio parahaemolyticus; identical to SEQ ID NO: 1876
  Vibrio parahaemolyticus CFSAN006135

SEQ ID NO: 4365 - DNA, 31 bp, Vibrio parahaemolyticus; identical to SEQ ID NO: 1877
  Vibrio parahaemolyticus CFSAN006135

SEQ ID NO: 4366 - DNA, 31 bp, Vibrio parahaemolyticus; identical to SEQ ID NO: 1878
  Vibrio parahaemolyticus CFSAN006135

SEQ ID NO: 4367 - DNA, 28 bp, Vibrio parahaemolyticus
  Vibrio parahaemolyticus ISF-01-07
gtgaactgccgaataggtagctgataat

SEQ ID NO: 4368 - DNA, 28 bp, Vibrio parahaemolyticus
  Vibrio parahaemolyticus ISF-01-07
gtgaactgccgcataggtagagagaatc

SEQ ID NO: 4369 - DNA, 28 bp, Vibrio parahaemolyticus
  Vibrio parahaemolyticus ISF-01-07
tcattactactaaaaagtagctgataac

SEQ ID NO: 4370 - DNA, 28 bp, Vibrio parahaemolyticus
  Vibrio parahaemolyticus ISF-01-07
gaatactgccgaacaggtaggaggctca

SEQ ID NO: 4371 - DNA, 32 bp, Vibrio parahaemolyticus; identical to SEQ ID NO: 2035
  Vibrio parahaemolyticus ISF-01-07

SEQ ID NO: 4372 - DNA, 31 bp, Vibrio parahaemolyticus; identical to SEQ ID NO: 1947
  Vibrio parahaemolyticus ISF-01-07

SEQ ID NO: 4373 - DNA, 31 bp, Vibrio parahaemolyticus; identical to SEQ ID NO: 1877
  Vibrio parahaemolyticus ISF-01-07

SEQ ID NO: 4374 - DNA, 31 bp, Vibrio parahaemolyticus; identical to SEQ ID NO: 1878
  Vibrio parahaemolyticus ISF-01-07

SEQ ID NO: 4375 - DNA, 28 bp, Vibrio parahaemolyticus
  Vibrio parahaemolyticus ISF-25-6
gttcaccgccgcataggcagctgataat

SEQ ID NO: 4376 - DNA, 28 bp, Vibrio parahaemolyticus
  Vibrio parahaemolyticus ISF-25-6
gttcaccgccgcataggcagatttaact

SEQ ID NO: 4377 - DNA, 28 bp, Vibrio parahaemolyticus
  Vibrio parahaemolyticus ISF-25-6
tcaccactactgtaaagtagctgataaa

SEQ ID NO: 4378 - DNA, 28 bp, Vibrio parahaemolyticus
  Vibrio parahaemolyticus ISF-25-6
aattactgctgaataagtagatatttat

SEQ ID NO: 4379 - DNA, 32 bp, Vibrio parahaemolyticus
  Vibrio parahaemolyticus ISF-25-6
aaacctcgtgttcactggaaatctttcgatgg

SEQ ID NO: 4380 - DNA, 32 bp, Vibrio parahaemolyticus; identical to SEQ ID NO: 2384
  Vibrio parahaemolyticus ISF-25-6

SEQ ID NO: 4381 - DNA, 31 bp, Vibrio parahaemolyticus
  Vibrio parahaemolyticus ISF-25-6
aaacgaaccacattcattcgagttcaagatc

SEQ ID NO: 4382 - DNA, 31 bp, Vibrio parahaemolyticus
  Vibrio parahaemolyticus ISF-25-6
aagcgtactacgttcatccgcgtacaagagc

SEQ ID NO: 4383 - DNA, 28 bp, Vibrio parahaemolyticus
  Vibrio parahaemolyticus CFSAN018757
gtgaactgccgaataggtagctgataat

SEQ ID NO: 4384 - DNA, 28 bp, Vibrio parahaemolyticus
  Vibrio parahaemolyticus CFSAN018757
gtgaactgccgcataggtagagagaatc

SEQ ID NO: 4385 - DNA, 28 bp, Vibrio parahaemolyticus
  Vibrio parahaemolyticus CFSAN018757
tcattactactaaaaagtagctgataac

SEQ ID NO: 4386 - DNA, 28 bp, Vibrio parahaemolyticus
  Vibrio parahaemolyticus CFSAN018757
gaatactgccgaacaggtaggaggctca

SEQ ID NO: 4387 - DNA, 32 bp, Vibrio parahaemolyticus; identical to SEQ ID NO: 1946
  Vibrio parahaemolyticus CFSAN018757

SEQ ID NO: 4388 - DNA, 31 bp, Vibrio parahaemolyticus; identical to SEQ ID NO: 1947
  Vibrio parahaemolyticus CFSAN018757

SEQ ID NO: 4389 - DNA, 31 bp, Vibrio parahaemolyticus; identical to SEQ ID NO: 1877
  Vibrio parahaemolyticus CFSAN018757

SEQ ID NO: 4390 - DNA, 31 bp, Vibrio parahaemolyticus; identical to SEQ ID NO: 1878
  Vibrio parahaemolyticus CFSAN018757

SEQ ID NO: 4391 - DNA, 28 bp, Vibrio parahaemolyticus
  Vibrio parahaemolyticus MAVP-14
gtgaactgccgaataggtagctgataat

SEQ ID NO: 4392 - DNA, 28 bp, Vibrio parahaemolyticus
  Vibrio parahaemolyticus MAVP-14
atgaactgccgaataggtagagaggagc

SEQ ID NO: 4393 - DNA, 28 bp, Vibrio parahaemolyticus
  Vibrio parahaemolyticus MAVP-14
tcattactacttaaaagtagctgataac

SEQ ID NO: 4394 - DNA, 28 bp, Vibrio parahaemolyticus
  Vibrio parahaemolyticus MAVP-14
gaatactgccgaacaggtaggaggctca

SEQ ID NO: 4395 - DNA, 31 bp, Vibrio parahaemolyticus; identical to SEQ ID NO: 1897
  Vibrio parahaemolyticus MAVP-14

SEQ ID NO: 4396 - DNA, 31 bp, Vibrio parahaemolyticus; identical to SEQ ID NO: 1877
  Vibrio parahaemolyticus MAVP-14

SEQ ID NO: 4397 - DNA, 31 bp, Vibrio parahaemolyticus; identical to SEQ ID NO: 1878
  Vibrio parahaemolyticus MAVP-14

SEQ ID NO: 4398 - DNA, 28 bp, Vibrio diabolicus
  Vibrio diabolicus FDAARGOS_105
gtgaactgccgaataggtagctgataat

SEQ ID NO: 4399 - DNA, 28 bp, Vibrio diabolicus
  Vibrio diabolicus FDAARGOS_105
gtgaactgccgcataggtagagaggatc

SEQ ID NO: 4400 - DNA, 28 bp, Vibrio diabolicus
  Vibrio diabolicus FDAARGOS_105
tcattactactgaaaagtagctgataac

SEQ ID NO: 4401 - DNA, 28 bp, Vibrio diabolicus
  Vibrio diabolicus FDAARGOS_105
gaatactgccgaacaggtaggaggctca

SEQ ID NO: 4402 - DNA, 32 bp, Vibrio diabolicus
  Vibrio diabolicus FDAARGOS_105
tctccaactaagttttctgtagcttcatcatt

SEQ ID NO: 4403 - DNA, 31 bp, Vibrio diabolicus
  Vibrio diabolicus FDAARGOS_105
aaatttacatctccaggctcagtcaaaaagc

SEQ ID NO: 4404 - DNA, 31 bp, Vibrio diabolicus
  Vibrio diabolicus FDAARGOS_105
aaattgacgtcactgggttctgctaaaaagc

SEQ ID NO: 4405 - DNA, 28 bp, Vibrio parahaemolyticus
  Vibrio parahaemolyticus S107
gtgaactgccgaataggtagctgataat

SEQ ID NO: 4406 - DNA, 28 bp, Vibrio parahaemolyticus
  Vibrio parahaemolyticus S107
gtgaactgccgcataggtagagagaatc

SEQ ID NO: 4407 - DNA, 28 bp, Vibrio parahaemolyticus
  Vibrio parahaemolyticus S107
tcattactactaaaaagtagctgataac

SEQ ID NO: 4408 - DNA, 28 bp, Vibrio parahaemolyticus
  Vibrio parahaemolyticus S107
gaatactgccgaacaggtaggaggctca

SEQ ID NO: 4409 - DNA, 32 bp, Vibrio parahaemolyticus; identical to SEQ ID NO: 2035
  Vibrio parahaemolyticus S107

SEQ ID NO: 4410 - DNA, 31 bp, Vibrio parahaemolyticus; identical to SEQ ID NO: 1947
  Vibrio parahaemolyticus S107

SEQ ID NO: 4411 - DNA, 31 bp, Vibrio parahaemolyticus; identical to SEQ ID NO: 1877
  Vibrio parahaemolyticus S107

SEQ ID NO: 4412 - DNA, 31 bp, Vibrio parahaemolyticus; identical to SEQ ID NO: 1970
  Vibrio parahaemolyticus S107

SEQ ID NO: 4413 - DNA, 28 bp, Vibrio parahaemolyticus
  Vibrio parahaemolyticus S061
gtgaactgccgaataggtagctgataat

SEQ ID NO: 4414 - DNA, 28 bp, Vibrio parahaemolyticus
  Vibrio parahaemolyticus S061
gtgaactgccgcataggtagagagaatc

SEQ ID NO: 4415 - DNA, 28 bp, Vibrio parahaemolyticus
  Vibrio parahaemolyticus S061
tcattactactaaaaagtagctgataac

SEQ ID NO: 4416 - DNA, 28 bp, Vibrio parahaemolyticus
  Vibrio parahaemolyticus S061
gaatactgccgaacaggtaggaggctca

SEQ ID NO: 4417 - DNA, 32 bp, Vibrio parahaemolyticus; identical to SEQ ID NO: 1946
  Vibrio parahaemolyticus S061

SEQ ID NO: 4418 - DNA, 31 bp, Vibrio parahaemolyticus; identical to SEQ ID NO: 1947
  Vibrio parahaemolyticus S061

SEQ ID NO: 4419 - DNA, 31 bp, Vibrio parahaemolyticus; identical to SEQ ID NO: 1877
  Vibrio parahaemolyticus S061

SEQ ID NO: 4420 - DNA, 31 bp, Vibrio parahaemolyticus; identical to SEQ ID NO: 1878
  Vibrio parahaemolyticus S061

SEQ ID NO: 4421 - DNA, 28 bp, Vibrio parahaemolyticus
  Vibrio parahaemolyticus G2_2
gtgaactgccgaataggtagctgataat

SEQ ID NO: 4422 - DNA, 28 bp, Vibrio parahaemolyticus
  Vibrio parahaemolyticus G2_2
gtgaactgccgcataggtagagagaatc

SEQ ID NO: 4423 - DNA, 28 bp, Vibrio parahaemolyticus
  Vibrio parahaemolyticus G2_2
tcattactactaaaaagtagctgataac

SEQ ID NO: 4424 - DNA, 28 bp, Vibrio parahaemolyticus
  Vibrio parahaemolyticus G2_2
gaatactgccgaacaggtaggaggctca

SEQ ID NO: 4425 - DNA, 32 bp, Vibrio parahaemolyticus; identical to SEQ ID NO: 1946
  Vibrio parahaemolyticus G2_2

SEQ ID NO: 4426 - DNA, 31 bp, Vibrio parahaemolyticus; identical to SEQ ID NO: 1947
  Vibrio parahaemolyticus G2_2

SEQ ID NO: 4427 - DNA, 31 bp, Vibrio parahaemolyticus; identical to SEQ ID NO: 1877
  Vibrio parahaemolyticus G2_2

SEQ ID NO: 4428 - DNA, 31 bp, Vibrio parahaemolyticus; identical to SEQ ID NO: 1878
  Vibrio parahaemolyticus G2_2

SEQ ID NO: 4429 - DNA, 28 bp, Vibrio parahaemolyticus
  Vibrio parahaemolyticus G1_10
gtgaactgccgaataggtagctgataat

SEQ ID NO: 4430 - DNA, 28 bp, Vibrio parahaemolyticus
  Vibrio parahaemolyticus G1_10
gtgaactgccgcataggtagagagaatc

SEQ ID NO: 4431 - DNA, 28 bp, Vibrio parahaemolyticus
  Vibrio parahaemolyticus G1_10
tcattactactaaaaagtagctgataac

SEQ ID NO: 4432 - DNA, 28 bp, Vibrio parahaemolyticus
  Vibrio parahaemolyticus G1_10
gaatactgccgaacaggtaggaggctca

SEQ ID NO: 4433 - DNA, 32 bp, Vibrio parahaemolyticus; identical to SEQ ID NO: 1946
  Vibrio parahaemolyticus G1_10

SEQ ID NO: 4434 - DNA, 31 bp, Vibrio parahaemolyticus; identical to SEQ ID NO: 1947
  Vibrio parahaemolyticus G1_10

SEQ ID NO: 4435 - DNA, 31 bp, Vibrio parahaemolyticus; identical to SEQ ID NO: 1877
  Vibrio parahaemolyticus G1_10

SEQ ID NO: 4436 - DNA, 31 bp, Vibrio parahaemolyticus; identical to SEQ ID NO: 1878
  Vibrio parahaemolyticus G1_10

SEQ ID NO: 4437 - DNA, 28 bp, Vibrio parahaemolyticus
  Vibrio parahaemolyticus F8_5
gtgaactgccgaataggtagctgataat

SEQ ID NO: 4438 - DNA, 28 bp, Vibrio parahaemolyticus
  Vibrio parahaemolyticus F8_5
gtgaactgccgcataggtagagaggatc

SEQ ID NO: 4439 - DNA, 28 bp, Vibrio parahaemolyticus
  Vibrio parahaemolyticus F8_5
tcattactactgaaaagtagctgataac

SEQ ID NO: 4440 - DNA, 28 bp, Vibrio parahaemolyticus
  Vibrio parahaemolyticus F8_5
gaatactgccgaacaggtaggagactca

SEQ ID NO: 4441 - DNA, 32 bp, Vibrio parahaemolyticus; identical to SEQ ID NO: 4177
  Vibrio parahaemolyticus F8_5

SEQ ID NO: 4442 - DNA, 31 bp, Vibrio parahaemolyticus; identical to SEQ ID NO: 4178
  Vibrio parahaemolyticus F8_5

SEQ ID NO: 4443 - DNA, 31 bp, Vibrio parahaemolyticus; identical to SEQ ID NO: 1970
  Vibrio parahaemolyticus F8_5

SEQ ID NO: 4444 - DNA, 28 bp, Vibrio parahaemolyticus
  Vibrio parahaemolyticus F3_10
gtgaactgccgaataggtagctgataat

SEQ ID NO: 4445 - DNA, 28 bp, Vibrio parahaemolyticus
  Vibrio parahaemolyticus F3_10
gtgaactgccgcataggtagagagaatc

SEQ ID NO: 4446 - DNA, 28 bp, Vibrio parahaemolyticus
  Vibrio parahaemolyticus F3_10
tcattactactaaaaagtagctgataac

SEQ ID NO: 4447 - DNA, 28 bp, Vibrio parahaemolyticus
  Vibrio parahaemolyticus F3_10
gaatactgccgaacaggtaggaggctca

SEQ ID NO: 4448 - DNA, 32 bp, Vibrio parahaemolyticus; identical to SEQ ID NO: 1946
  Vibrio parahaemolyticus F3_10

SEQ ID NO: 4449 - DNA, 31 bp, Vibrio parahaemolyticus; identical to SEQ ID NO: 1947
  Vibrio parahaemolyticus F3_10

SEQ ID NO: 4450 - DNA, 31 bp, Vibrio parahaemolyticus; identical to SEQ ID NO: 1877
  Vibrio parahaemolyticus F3_10

SEQ ID NO: 4451 - DNA, 31 bp, Vibrio parahaemolyticus; identical to SEQ ID NO: 1878
  Vibrio parahaemolyticus F3_10

SEQ ID NO: 4452 - DNA, 28 bp, Vibrio parahaemolyticus
  Vibrio parahaemolyticus F3_3
gtgaactgccgaataggtagctgataat

SEQ ID NO: 4453 - DNA, 28 bp, Vibrio parahaemolyticus
  Vibrio parahaemolyticus F3_3
gtgaactgccgcataggtagagagaatc

SEQ ID NO: 4454 - DNA, 28 bp, Vibrio parahaemolyticus
  Vibrio parahaemolyticus F3_3
tcattactactaaaaagtagctgataac

SEQ ID NO: 4455 - DNA, 28 bp, Vibrio parahaemolyticus
  Vibrio parahaemolyticus F3_3
gaatactgccgaacaggtaggaggctca

SEQ ID NO: 4456 - DNA, 32 bp, Vibrio parahaemolyticus; identical to SEQ ID NO: 1946
  Vibrio parahaemolyticus F3_3

SEQ ID NO: 4457 - DNA, 31 bp, Vibrio parahaemolyticus; identical to SEQ ID NO: 1947
  Vibrio parahaemolyticus F3_3

SEQ ID NO: 4458 - DNA, 31 bp, Vibrio parahaemolyticus; identical to SEQ ID NO: 1877
  Vibrio parahaemolyticus F3_3

SEQ ID NO: 4459 - DNA, 31 bp, Vibrio parahaemolyticus; identical to SEQ ID NO: 1878
  Vibrio parahaemolyticus F3_3

SEQ ID NO: 4460 - DNA, 28 bp, Vibrio parahaemolyticus
  Vibrio parahaemolyticus F3_8
gtgaactgccgaataggtagctgataat

SEQ ID NO: 4461 - DNA, 28 bp, Vibrio parahaemolyticus
  Vibrio parahaemolyticus F3_8
gtgaactgccgcataggtagagagaatc

SEQ ID NO: 4462 - DNA, 28 bp, Vibrio parahaemolyticus
  Vibrio parahaemolyticus F3_8
tcattactactaaaaagtagctgataac

SEQ ID NO: 4463 - DNA, 28 bp, Vibrio parahaemolyticus
  Vibrio parahaemolyticus F3_8
gaatactgccgaacaggtaggaggctca

SEQ ID NO: 4464 - DNA, 32 bp, Vibrio parahaemolyticus; identical to SEQ ID NO: 1946
  Vibrio parahaemolyticus F3_8

SEQ ID NO: 4465 - DNA, 31 bp, Vibrio parahaemolyticus; identical to SEQ ID NO: 1947
  Vibrio parahaemolyticus F3_8

SEQ ID NO: 4466 - DNA, 31 bp, Vibrio parahaemolyticus; identical to SEQ ID NO: 1877
  Vibrio parahaemolyticus F3_8

SEQ ID NO: 4467 - DNA, 31 bp, Vibrio parahaemolyticus; identical to SEQ ID NO: 1878
  Vibrio parahaemolyticus F3_8

SEQ ID NO: 4468 - DNA, 28 bp, Vibrio parahaemolyticus
  Vibrio parahaemolyticus F2_10
gtgaactgccgaataggtagctgataat

SEQ ID NO: 4469 - DNA, 28 bp, Vibrio parahaemolyticus
  Vibrio parahaemolyticus F2_10
gtgaactgccgcataggtagagagaatc

SEQ ID NO: 4470 - DNA, 28 bp, Vibrio parahaemolyticus
  Vibrio parahaemolyticus F2_10
tcattactactaaaaagtagctgataac

SEQ ID NO: 4471 - DNA, 28 bp, Vibrio parahaemolyticus
  Vibrio parahaemolyticus F2_10
gaatactgccgaacaggtaggaggctca

SEQ ID NO: 4472 - DNA, 32 bp, Vibrio parahaemolyticus; identical to SEQ ID NO: 1946
  Vibrio parahaemolyticus F2_10

SEQ ID NO: 4473 - DNA, 31 bp, Vibrio parahaemolyticus; identical to SEQ ID NO: 1947
  Vibrio parahaemolyticus F2_10

SEQ ID NO: 4474 - DNA, 31 bp, Vibrio parahaemolyticus; identical to SEQ ID NO: 1877
  Vibrio parahaemolyticus F2_10

SEQ ID NO: 4475 - DNA, 31 bp, Vibrio parahaemolyticus; identical to SEQ ID NO: 1878
  Vibrio parahaemolyticus F2_10

SEQ ID NO: 4476 - DNA, 28 bp, Vibrio parahaemolyticus
  Vibrio parahaemolyticus E1_9
gttcaccgccgcataggcagctgataat

SEQ ID NO: 4477 - DNA, 28 bp, Vibrio parahaemolyticus
  Vibrio parahaemolyticus E1_9
gttcaccgccgcataggcagatttaact

SEQ ID NO: 4478 - DNA, 28 bp, Vibrio parahaemolyticus
  Vibrio parahaemolyticus E1_9
tcaccactactgtaaagtagctgataaa

SEQ ID NO: 4479 - DNA, 28 bp, Vibrio parahaemolyticus
  Vibrio parahaemolyticus E1_9
aattactgctgaataagtagatatttat

SEQ ID NO: 4480 - DNA, 32 bp, Vibrio parahaemolyticus; identical to SEQ ID NO: 4379
  Vibrio parahaemolyticus E1_9

SEQ ID NO: 4481 - DNA, 32 bp, Vibrio parahaemolyticus; identical to SEQ ID NO: 2384
  Vibrio parahaemolyticus E1_9

SEQ ID NO: 4482 - DNA, 31 bp, Vibrio parahaemolyticus; identical to SEQ ID NO: 4381
  Vibrio parahaemolyticus E1_9

SEQ ID NO: 4483 - DNA, 31 bp, Vibrio parahaemolyticus; identical to SEQ ID NO: 4382
  Vibrio parahaemolyticus E1_9

SEQ ID NO: 4484 - DNA, 28 bp, Vibrio parahaemolyticus
  Vibrio parahaemolyticus VP120036
gtgaactgccgaataggtagctgataat

SEQ ID NO: 4485 - DNA, 28 bp, Vibrio parahaemolyticus
  Vibrio parahaemolyticus VP120036
gtgaactgccgcataggtagagagaatc

SEQ ID NO: 4486 - DNA, 28 bp, Vibrio parahaemolyticus
  Vibrio parahaemolyticus VP120036
tcattactactaaaaagtagctgataac

SEQ ID NO: 4487 - DNA, 28 bp, Vibrio parahaemolyticus
  Vibrio parahaemolyticus VP120036
gaatactgccgaacaggtaggaggctca

SEQ ID NO: 4488 - DNA, 32 bp, Vibrio parahaemolyticus; identical to SEQ ID NO: 2035
  Vibrio parahaemolyticus VP120036

SEQ ID NO: 4489 - DNA, 31 bp, Vibrio parahaemolyticus; identical to SEQ ID NO: 1947
  Vibrio parahaemolyticus VP120036

SEQ ID NO: 4490 - DNA, 31 bp, Vibrio parahaemolyticus; identical to SEQ ID NO: 1877
  Vibrio parahaemolyticus VP120036

SEQ ID NO: 4491 - DNA, 31 bp, Vibrio parahaemolyticus; identical to SEQ ID NO: 1878
  Vibrio parahaemolyticus VP120036

SEQ ID NO: 4492 - DNA, 28 bp, Vibrio parahaemolyticus
  Vibrio parahaemolyticus VP150244
gtgaactgccgaataggtagctgataat

SEQ ID NO: 4493 - DNA, 28 bp, Vibrio parahaemolyticus
  Vibrio parahaemolyticus VP150244
gtgaactgccgcataggtagagagaatc

SEQ ID NO: 4494 - DNA, 28 bp, Vibrio parahaemolyticus
  Vibrio parahaemolyticus VP150244
tcattactactaaaaagtagctgataac

SEQ ID NO: 4495 - DNA, 28 bp, Vibrio parahaemolyticus
  Vibrio parahaemolyticus VP150244
gaatactgccgaacaggtaggaggctca

SEQ ID NO: 4496 - DNA, 32 bp, Vibrio parahaemolyticus; identical to SEQ ID NO: 2035
  Vibrio parahaemolyticus VP150244

SEQ ID NO: 4497 - DNA, 31 bp, Vibrio parahaemolyticus; identical to SEQ ID NO: 1947
  Vibrio parahaemolyticus VP150244

SEQ ID NO: 4498 - DNA, 31 bp, Vibrio parahaemolyticus; identical to SEQ ID NO: 1877
  Vibrio parahaemolyticus VP150244

SEQ ID NO: 4499 - DNA, 31 bp, Vibrio parahaemolyticus; identical to SEQ ID NO: 1878
  Vibrio parahaemolyticus VP150244

SEQ ID NO: 4500 - DNA, 28 bp, Vibrio parahaemolyticus
  Vibrio parahaemolyticus VP100044
gtgaactgccgaataggtagctgataat

SEQ ID NO: 4501 - DNA, 28 bp, Vibrio parahaemolyticus
  Vibrio parahaemolyticus VP100044
gtgaactgccgcataggtagagagaatc

SEQ ID NO: 4502 - DNA, 28 bp, Vibrio parahaemolyticus
  Vibrio parahaemolyticus VP100044
tcattactactaaaaagtagctgataac

SEQ ID NO: 4503 - DNA, 28 bp, Vibrio parahaemolyticus
  Vibrio parahaemolyticus VP100044
gaatactgccgaacaggtaggaggctca

SEQ ID NO: 4504 - DNA, 32 bp, Vibrio parahaemolyticus; identical to SEQ ID NO: 2035
  Vibrio parahaemolyticus VP100044

SEQ ID NO: 4505 - DNA, 31 bp, Vibrio parahaemolyticus; identical to SEQ ID NO: 1947
  Vibrio parahaemolyticus VP100044

SEQ ID NO: 4506 - DNA, 31 bp, Vibrio parahaemolyticus; identical to SEQ ID NO: 1877
  Vibrio parahaemolyticus VP100044

SEQ ID NO: 4507 - DNA, 31 bp, Vibrio parahaemolyticus; identical to SEQ ID NO: 1878
  Vibrio parahaemolyticus VP100044

SEQ ID NO: 4508 - DNA, 28 bp, Vibrio parahaemolyticus
  Vibrio parahaemolyticus VP160675
gtgaactgccgaataggtagctgataat

SEQ ID NO: 4509 - DNA, 28 bp, Vibrio parahaemolyticus
  Vibrio parahaemolyticus VP160675
gtgaactgccgcataggtagagagaatc

SEQ ID NO: 4510 - DNA, 28 bp, Vibrio parahaemolyticus
  Vibrio parahaemolyticus VP160675
tcattactactaaaaagtagctgataac

SEQ ID NO: 4511 - DNA, 28 bp, Vibrio parahaemolyticus
  Vibrio parahaemolyticus VP160675
gaatactgccgaacaggtaggaggctca

SEQ ID NO: 4512 - DNA, 32 bp, Vibrio parahaemolyticus; identical to SEQ ID NO: 2034
  Vibrio parahaemolyticus VP160675

SEQ ID NO: 4513 - DNA, 32 bp, Vibrio parahaemolyticus; identical to SEQ ID NO: 2035
  Vibrio parahaemolyticus VP160675

SEQ ID NO: 4514 - DNA, 31 bp, Vibrio parahaemolyticus; identical to SEQ ID NO: 1947
  Vibrio parahaemolyticus VP160675

SEQ ID NO: 4515 - DNA, 31 bp, Vibrio parahaemolyticus; identical to SEQ ID NO: 1877
  Vibrio parahaemolyticus VP160675

SEQ ID NO: 4516 - DNA, 31 bp, Vibrio parahaemolyticus; identical to SEQ ID NO: 1878
  Vibrio parahaemolyticus VP160675

SEQ ID NO: 4517 - DNA, 28 bp, Vibrio parahaemolyticus
  Vibrio parahaemolyticus VP160483
gtgaactgccgaataggtagctgataat

SEQ ID NO: 4518 - DNA, 28 bp, Vibrio parahaemolyticus
  Vibrio parahaemolyticus VP160483
gtgaactgccgcataggtagagagaatc

SEQ ID NO: 4519 - DNA, 28 bp, Vibrio parahaemolyticus
  Vibrio parahaemolyticus VP160483
tcattactactaaaaagtagctgataac

SEQ ID NO: 4520 - DNA, 28 bp, Vibrio parahaemolyticus
  Vibrio parahaemolyticus VP160483
gaatactgccgaacaggtaggaggctca

SEQ ID NO: 4521 - DNA, 32 bp, Vibrio parahaemolyticus; identical to SEQ ID NO: 2035
  Vibrio parahaemolyticus VP160483

SEQ ID NO: 4522 - DNA, 31 bp, Vibrio parahaemolyticus; identical to SEQ ID NO: 1947
  Vibrio parahaemolyticus VP160483

SEQ ID NO: 4523 - DNA, 31 bp, Vibrio parahaemolyticus; identical to SEQ ID NO: 1877
  Vibrio parahaemolyticus VP160483

SEQ ID NO: 4524 - DNA, 31 bp, Vibrio parahaemolyticus; identical to SEQ ID NO: 1878
  Vibrio parahaemolyticus VP160483

SEQ ID NO: 4525 - DNA, 28 bp, Vibrio parahaemolyticus
  Vibrio parahaemolyticus VP140355
gtgaactgccgaataggtagctgataat

SEQ ID NO: 4526 - DNA, 28 bp, Vibrio parahaemolyticus
  Vibrio parahaemolyticus VP140355
gtgaactgccgcataggtagagagaatc

SEQ ID NO: 4527 - DNA, 28 bp, Vibrio parahaemolyticus
  Vibrio parahaemolyticus VP140355
tcattactactaaaaagtagctgataac

SEQ ID NO: 4528 - DNA, 28 bp, Vibrio parahaemolyticus
  Vibrio parahaemolyticus VP140355
gaatactgccgaacaggtaggaggctca

SEQ ID NO: 4529 - DNA, 32 bp, Vibrio parahaemolyticus; identical to SEQ ID NO: 2035
  Vibrio parahaemolyticus VP140355

SEQ ID NO: 4530 - DNA, 31 bp, Vibrio parahaemolyticus; identical to SEQ ID NO: 1947
  Vibrio parahaemolyticus VP140355

SEQ ID NO: 4531 - DNA, 31 bp, Vibrio parahaemolyticus; identical to SEQ ID NO: 1877
  Vibrio parahaemolyticus VP140355

SEQ ID NO: 4532 - DNA, 31 bp, Vibrio parahaemolyticus; identical to SEQ ID NO: 1878
  Vibrio parahaemolyticus VP140355

SEQ ID NO: 4533 - DNA, 28 bp, Vibrio parahaemolyticus
  Vibrio parahaemolyticus VP161902
gtgaactgccgaataggtagctgataat

SEQ ID NO: 4534 - DNA, 28 bp, Vibrio parahaemolyticus
  Vibrio parahaemolyticus VP161902
gtgaactgccgcataggtagagagaatc

SEQ ID NO: 4535 - DNA, 28 bp, Vibrio parahaemolyticus
  Vibrio parahaemolyticus VP161902
tcattactactaaaaagtagctgataac

SEQ ID NO: 4536 - DNA, 28 bp, Vibrio parahaemolyticus
  Vibrio parahaemolyticus VP161902
gaatactgccgaacaggtaggaggctca

SEQ ID NO: 4537 - DNA, 32 bp, Vibrio parahaemolyticus; identical to SEQ ID NO: 2035
  Vibrio parahaemolyticus VP161902

SEQ ID NO: 4538 - DNA, 31 bp, Vibrio parahaemolyticus; identical to SEQ ID NO: 1947
  Vibrio parahaemolyticus VP161902

SEQ ID NO: 4539 - DNA, 31 bp, Vibrio parahaemolyticus; identical to SEQ ID NO: 1877
  Vibrio parahaemolyticus VP161902

SEQ ID NO: 4540 - DNA, 31 bp, Vibrio parahaemolyticus; identical to SEQ ID NO: 1878
  Vibrio parahaemolyticus VP161902

SEQ ID NO: 4541 - DNA, 28 bp, Vibrio parahaemolyticus
  Vibrio parahaemolyticus HZ16-515
gtgaactgccgaataggtagctgataat

SEQ ID NO: 4542 - DNA, 28 bp, Vibrio parahaemolyticus
  Vibrio parahaemolyticus HZ16-515
gtgaactgccgcataggtagagagaatc

SEQ ID NO: 4543 - DNA, 28 bp, Vibrio parahaemolyticus
  Vibrio parahaemolyticus HZ16-515
tcattactactaaaaagtagctgataac

SEQ ID NO: 4544 - DNA, 28 bp, Vibrio parahaemolyticus
  Vibrio parahaemolyticus HZ16-515
gaatactgccgaacaggtaggaggctca

SEQ ID NO: 4545 - DNA, 32 bp, Vibrio parahaemolyticus; identical to SEQ ID NO: 2035
  Vibrio parahaemolyticus HZ16-515

SEQ ID NO: 4546 - DNA, 31 bp, Vibrio parahaemolyticus; identical to SEQ ID NO: 1947
  Vibrio parahaemolyticus HZ16-515

SEQ ID NO: 4547 - DNA, 31 bp, Vibrio parahaemolyticus; identical to SEQ ID NO: 1877
  Vibrio parahaemolyticus HZ16-515

SEQ ID NO: 4548 - DNA, 31 bp, Vibrio parahaemolyticus; identical to SEQ ID NO: 1878
  Vibrio parahaemolyticus HZ16-515

SEQ ID NO: 4549 - DNA, 28 bp, Vibrio parahaemolyticus
  Vibrio parahaemolyticus HZ15-046
gtgaactgccgaataggtagctgataat

SEQ ID NO: 4550 - DNA, 28 bp, Vibrio parahaemolyticus
  Vibrio parahaemolyticus HZ15-046
gtgaactgccgcataggtagagagaatc

SEQ ID NO: 4551 - DNA, 28 bp, Vibrio parahaemolyticus
  Vibrio parahaemolyticus HZ15-046
tcattactactaaaaagtagctgataac

SEQ ID NO: 4552 - DNA, 28 bp, Vibrio parahaemolyticus
  Vibrio parahaemolyticus HZ15-046
gaatactgccgaacaggtaggaggctca

SEQ ID NO: 4553 - DNA, 32 bp, Vibrio parahaemolyticus; identical to SEQ ID NO: 2035
  Vibrio parahaemolyticus HZ15-046

SEQ ID NO: 4554 - DNA, 31 bp, Vibrio parahaemolyticus; identical to SEQ ID NO: 1947
  Vibrio parahaemolyticus HZ15-046

SEQ ID NO: 4555 - DNA, 31 bp, Vibrio parahaemolyticus; identical to SEQ ID NO: 1877
  Vibrio parahaemolyticus HZ15-046

SEQ ID NO: 4556 - DNA, 31 bp, Vibrio parahaemolyticus; identical to SEQ ID NO: 2038
  Vibrio parahaemolyticus HZ15-046

SEQ ID NO: 4557 - DNA, 28 bp, Vibrio parahaemolyticus
  Vibrio parahaemolyticus HZ14-002
gtgaactgccgaataggtagctgataat

SEQ ID NO: 4558 - DNA, 28 bp, Vibrio parahaemolyticus
  Vibrio parahaemolyticus HZ14-002
gtgaactgccgcataggtagagagaatc

SEQ ID NO: 4559 - DNA, 28 bp, Vibrio parahaemolyticus
  Vibrio parahaemolyticus HZ14-002
tcattactactaaaaagtagctgataac

SEQ ID NO: 4560 - DNA, 28 bp, Vibrio parahaemolyticus
  Vibrio parahaemolyticus HZ14-002
gaatactgccgaacaggtaggaggctca

SEQ ID NO: 4561 - DNA, 32 bp, Vibrio parahaemolyticus; identical to SEQ ID NO: 2034
  Vibrio parahaemolyticus HZ14-002

SEQ ID NO: 4562 - DNA, 32 bp, Vibrio parahaemolyticus; identical to SEQ ID NO: 2035
  Vibrio parahaemolyticus HZ14-002

SEQ ID NO: 4563 - DNA, 31 bp, Vibrio parahaemolyticus; identical to SEQ ID NO: 1947
  Vibrio parahaemolyticus HZ14-002

SEQ ID NO: 4564 - DNA, 31 bp, Vibrio parahaemolyticus; identical to SEQ ID NO: 1877
  Vibrio parahaemolyticus HZ14-002

SEQ ID NO: 4565 - DNA, 31 bp, Vibrio parahaemolyticus; identical to SEQ ID NO: 1878
  Vibrio parahaemolyticus HZ14-002

SEQ ID NO: 4566 - DNA, 28 bp, Vibrio parahaemolyticus
  Vibrio parahaemolyticus HZ13-043
gtgaactgccgaataggtagctgataat

SEQ ID NO: 4567 - DNA, 28 bp, Vibrio parahaemolyticus
  Vibrio parahaemolyticus HZ13-043
gtgaactgccgcataggtagagagaatc

SEQ ID NO: 4568 - DNA, 28 bp, Vibrio parahaemolyticus
  Vibrio parahaemolyticus HZ13-043
tcattactactaaaaagtagctgataac

SEQ ID NO: 4569 - DNA, 28 bp, Vibrio parahaemolyticus
  Vibrio parahaemolyticus HZ13-043
gaatactgccgaacaggtaggaggctca

SEQ ID NO: 4570 - DNA, 32 bp, Vibrio parahaemolyticus; identical to SEQ ID NO: 2035
  Vibrio parahaemolyticus HZ13-043

SEQ ID NO: 4571 - DNA, 31 bp, Vibrio parahaemolyticus; identical to SEQ ID NO: 1947
  Vibrio parahaemolyticus HZ13-043

SEQ ID NO: 4572 - DNA, 31 bp, Vibrio parahaemolyticus; identical to SEQ ID NO: 1877
  Vibrio parahaemolyticus HZ13-043

SEQ ID NO: 4573 - DNA, 31 bp, Vibrio parahaemolyticus; identical to SEQ ID NO: 1878
  Vibrio parahaemolyticus HZ13-043

SEQ ID NO: 4574 - DNA, 28 bp, Vibrio cholerae
  Vibrio cholerae N2825
gtgaactgccgagtaggtagctgataat

SEQ ID NO: 4575 - DNA, 28 bp, Vibrio cholerae
  Vibrio cholerae N2825
gtgaactgccaagtaggtagctgacaat

SEQ ID NO: 4576 - DNA, 28 bp, Vibrio cholerae
  Vibrio cholerae N2825
gtgaactgctgagtaggcagagcgcatc

SEQ ID NO: 4577 - DNA, 28 bp, Vibrio cholerae
  Vibrio cholerae N2825
tcactactactgcgaagtagctgataac

SEQ ID NO: 4578 - DNA, 28 bp, Vibrio cholerae
  Vibrio cholerae N2825
ctttactgctgaataagtagataactac

SEQ ID NO: 4579 - DNA, 32 bp, Vibrio cholerae
  Vibrio cholerae N2825
tttttccgttataaatggtgcgccattatgct

SEQ ID NO: 4580 - DNA, 32 bp, Vibrio cholerae
  Vibrio cholerae N2825
agactacgatgtttcaattcacgcgcaagaaa

SEQ ID NO: 4581 - DNA, 32 bp, Vibrio cholerae
  Vibrio cholerae N2825
gacttatagatgtagttgttgtctccataact

SEQ ID NO: 4582 - DNA, 32 bp, Vibrio cholerae; identical to SEQ ID NO: 3019
  Vibrio cholerae N2825

SEQ ID NO: 4583 - DNA, 32 bp, Vibrio cholerae; identical to SEQ ID NO: 3020
  Vibrio cholerae N2825

SEQ ID NO: 4584 - DNA, 28 bp, Vibrio parahaemolyticus
  Vibrio parahaemolyticus VP161168
gtgaactgccgaataggtagctgataat

SEQ ID NO: 4585 - DNA, 28 bp, Vibrio parahaemolyticus
  Vibrio parahaemolyticus VP161168
gtgaactgccgcataggtagagagaatc

SEQ ID NO: 4586 - DNA, 28 bp, Vibrio parahaemolyticus
  Vibrio parahaemolyticus VP161168
tcattactactaaaaagtagctgataac

SEQ ID NO: 4587 - DNA, 28 bp, Vibrio parahaemolyticus
  Vibrio parahaemolyticus VP161168
gaatactgccgaacaggtaggaggctca

SEQ ID NO: 4588 - DNA, 32 bp, Vibrio parahaemolyticus; identical to SEQ ID NO: 1946
  Vibrio parahaemolyticus VP161168

SEQ ID NO: 4589 - DNA, 31 bp, Vibrio parahaemolyticus; identical to SEQ ID NO: 1947
  Vibrio parahaemolyticus VP161168

SEQ ID NO: 4590 - DNA, 31 bp, Vibrio parahaemolyticus; identical to SEQ ID NO: 1877
  Vibrio parahaemolyticus VP161168

SEQ ID NO: 4591 - DNA, 31 bp, Vibrio parahaemolyticus; identical to SEQ ID NO: 1878
  Vibrio parahaemolyticus VP161168

SEQ ID NO: 4592 - DNA, 28 bp, Vibrio parahaemolyticus
  Vibrio parahaemolyticus FDAARGOS_53
gtgaactgccgaataggtagctgataat

SEQ ID NO: 4593 - DNA, 28 bp, Vibrio parahaemolyticus
  Vibrio parahaemolyticus FDAARGOS_53
gtgaactgccgcataggtagagaggatc

SEQ ID NO: 4594 - DNA, 28 bp, Vibrio parahaemolyticus
  Vibrio parahaemolyticus FDAARGOS_53
tcatcactactgaaaagtagctgataac

SEQ ID NO: 4595 - DNA, 28 bp, Vibrio parahaemolyticus
  Vibrio parahaemolyticus FDAARGOS_53
gaatactgccgaacaggtaggaggctca

SEQ ID NO: 4596 - DNA, 31 bp, Vibrio parahaemolyticus; identical to SEQ ID NO: 1876
  Vibrio parahaemolyticus FDAARGOS_53

SEQ ID NO: 4597 - DNA, 31 bp, Vibrio parahaemolyticus; identical to SEQ ID NO: 1877
  Vibrio parahaemolyticus FDAARGOS_53

SEQ ID NO: 4598 - DNA, 31 bp, Vibrio parahaemolyticus; identical to SEQ ID NO: 1878
  Vibrio parahaemolyticus FDAARGOS_53

SEQ ID NO: 4599 - DNA, 28 bp, Vibrio cyclitrophicus
  Vibrio cyclitrophicus ZF99
gtgtactgccgaataggtagctgataag

SEQ ID NO: 4600 - DNA, 28 bp, Vibrio cyclitrophicus
  Vibrio cyclitrophicus ZF99
gtgtactgccgaataggtagccatccaa

SEQ ID NO: 4601 - DNA, 28 bp, Vibrio cyclitrophicus
  Vibrio cyclitrophicus ZF99
ctttactactgaaatagtagctgataat

SEQ ID NO: 4602 - DNA, 28 bp, Vibrio cyclitrophicus
  Vibrio cyclitrophicus ZF99
atatactgctgaataagtagatttttag

SEQ ID NO: 4603 - DNA, 32 bp, Vibrio cyclitrophicus; identical to SEQ ID NO: 2993
  Vibrio cyclitrophicus ZF99

SEQ ID NO: 4604 - DNA, 32 bp, Vibrio cyclitrophicus; identical to SEQ ID NO: 2994
  Vibrio cyclitrophicus ZF99

SEQ ID NO: 4605 - DNA, 32 bp, Vibrio cyclitrophicus; identical to SEQ ID NO: 2756
  Vibrio cyclitrophicus ZF99

SEQ ID NO: 4606 - DNA, 28 bp, Vibrio tasmaniensis
  Vibrio tasmaniensis 10N.261.51.E11
gtgaactgccgaataggtagctgataat

SEQ ID NO: 4607 - DNA, 28 bp, Vibrio tasmaniensis
  Vibrio tasmaniensis 10N.261.51.E11
gtgaactgccgaataggtagaagcccct

SEQ ID NO: 4608 - DNA, 28 bp, Vibrio tasmaniensis
  Vibrio tasmaniensis 10N.261.51.E11
ccagcactactgcaaagtagttgataac

SEQ ID NO: 4609 - DNA, 28 bp, Vibrio tasmaniensis
  Vibrio tasmaniensis 10N.261.51.E11
attcactgctgaataagtagatactcta

SEQ ID NO: 4610 - DNA, 32 bp, Vibrio tasmaniensis
  Vibrio tasmaniensis 10N.261.51.E11
agactctatatcgatgagcatcacaatgttgt

SEQ ID NO: 4611 - DNA, 32 bp, Vibrio tasmaniensis
  Vibrio tasmaniensis 10N.261.51.E11
aaacgaaccacattcattcgagttccagagca

SEQ ID NO: 4612 - DNA, 32 bp, Vibrio tasmaniensis
  Vibrio tasmaniensis 10N.261.51.E11
aagcgtacgactttcattcgtgtacaagagca

SEQ ID NO: 4613 - DNA, 28 bp, Vibrio parahaemolyticus
  Vibrio parahaemolyticus 3256
gtgaactgccgaataggtagctgataat

SEQ ID NO: 4614 - DNA, 28 bp, Vibrio parahaemolyticus
  Vibrio parahaemolyticus 3256
gtgaactgccgcataggtagagaggatc

SEQ ID NO: 4615 - DNA, 28 bp, Vibrio parahaemolyticus
  Vibrio parahaemolyticus 3256
tcatcactactgaaaagtagctgataac

SEQ ID NO: 4616 - DNA, 28 bp, Vibrio parahaemolyticus
  Vibrio parahaemolyticus 3256
gaatactgccgaacaggtaggaggctca

SEQ ID NO: 4617 - DNA, 31 bp, Vibrio parahaemolyticus; identical to SEQ ID NO: 1876
  Vibrio parahaemolyticus 3256

SEQ ID NO: 4618 - DNA, 31 bp, Vibrio parahaemolyticus; identical to SEQ ID NO: 1877
  Vibrio parahaemolyticus 3256

SEQ ID NO: 4619 - DNA, 31 bp, Vibrio parahaemolyticus; identical to SEQ ID NO: 1878
  Vibrio parahaemolyticus 3256

SEQ ID NO: 4620 - DNA, 28 bp, Photobacterium iliopiscarium
  Photobacterium iliopiscarium ATCC 51760
gtgtactgccgagtaggcaactgataac

SEQ ID NO: 4621 - DNA, 28 bp, Photobacterium iliopiscarium
  Photobacterium iliopiscarium ATCC 51760
gtgtactgccgagtaggcagctgataac

SEQ ID NO: 4622 - DNA, 28 bp, Photobacterium iliopiscarium
  Photobacterium iliopiscarium ATCC 51760
gtgtactgccgagtaggtacatttatca

SEQ ID NO: 4623 - DNA, 28 bp, Photobacterium iliopiscarium
  Photobacterium iliopiscarium ATCC 51760
ccattactactgaaaagtagctgataaa

SEQ ID NO: 4624 - DNA, 28 bp, Photobacterium iliopiscarium
  Photobacterium iliopiscarium ATCC 51760
atatactgctgaataagtagataattaa

SEQ ID NO: 4625 - DNA, 32 bp, Photobacterium iliopiscarium; identical to SEQ ID NO: 2258
  Photobacterium iliopiscarium ATCC 51760

SEQ ID NO: 4626 - DNA, 32 bp, Photobacterium iliopiscarium; identical to SEQ ID NO: 2259
  Photobacterium iliopiscarium ATCC 51760

SEQ ID NO: 4627 - DNA, 32 bp, Photobacterium iliopiscarium; identical to SEQ ID NO: 2260
  Photobacterium iliopiscarium ATCC 51760

SEQ ID NO: 4628 - DNA, 33 bp, Photobacterium iliopiscarium; identical to SEQ ID NO: 2261
  Photobacterium iliopiscarium ATCC 51760

SEQ ID NO: 4629 - DNA, 32 bp, Photobacterium iliopiscarium; identical to SEQ ID NO: 2262
  Photobacterium iliopiscarium ATCC 51760

SEQ ID NO: 4630 - DNA, 32 bp, Photobacterium iliopiscarium; identical to SEQ ID NO: 2263
  Photobacterium iliopiscarium ATCC 51760

SEQ ID NO: 4631 - DNA, 32 bp, Photobacterium iliopiscarium; identical to SEQ ID NO: 2264
  Photobacterium iliopiscarium ATCC 51760

SEQ ID NO: 4632 - DNA, 32 bp, Photobacterium iliopiscarium; identical to SEQ ID NO: 2251
  Photobacterium iliopiscarium ATCC 51760

SEQ ID NO: 4633 - DNA, 32 bp, Photobacterium iliopiscarium; identical to SEQ ID NO: 2266
  Photobacterium iliopiscarium ATCC 51760

SEQ ID NO: 4634 - DNA, 28 bp, Vibrio sp.
  Vibrio sp. PID23_8
gtgtactgccgaataggtagctgatcat

SEQ ID NO: 4635 - DNA, 28 bp, Vibrio sp.
  Vibrio sp. PID23_8
gtgtactgccgaataggtagctgactct

SEQ ID NO: 4636 - DNA, 28 bp, Vibrio sp.
  Vibrio sp. PID23_8
ttgcaactgctgtgaagtagctgataat

SEQ ID NO: 4637 - DNA, 28 bp, Vibrio sp.
  Vibrio sp. PID23_8
atttactgctgaataagtagatacttta

SEQ ID NO: 4638 - DNA, 32 bp, Vibrio sp.
  Vibrio sp. PID23_8
aagcctctacagcaagcaataccaagccgatc

SEQ ID NO: 4639 - DNA, 32 bp, Vibrio sp.
  Vibrio sp. PID23_8
gagtaataacgtaccgcagccaccttcaacca

SEQ ID NO: 4640 - DNA, 32 bp, Vibrio sp.
  Vibrio sp. PID23_8
aaccattatttgtcatcgttcgatgaagaact

SEQ ID NO: 4641 - DNA, 32 bp, Vibrio sp.
  Vibrio sp. PID23_8
aaacgaaccactttcattcgtgttcaagaaca

SEQ ID NO: 4642 - DNA, 32 bp, Vibrio sp.
  Vibrio sp. PID23_8
aagagaacgacatttatccgcgttcaagagca

SEQ ID NO: 4643 - DNA, 28 bp, Vibrio parahaemolyticus
  Vibrio parahaemolyticus NIHCB0603
gtgaactgccgaataggtagctgataat

SEQ ID NO: 4644 - DNA, 28 bp, Vibrio parahaemolyticus
  Vibrio parahaemolyticus NIHCB0603
gtgaactgccgcataggtagagagaatc

SEQ ID NO: 4645 - DNA, 28 bp, Vibrio parahaemolyticus
  Vibrio parahaemolyticus NIHCB0603
tcattactactaaaaagtagctgataac

SEQ ID NO: 4646 - DNA, 28 bp, Vibrio parahaemolyticus
  Vibrio parahaemolyticus NIHCB0603
gaatactgccgaacaggtaggaggctca

SEQ ID NO: 4647 - DNA, 32 bp, Vibrio parahaemolyticus; identical to SEQ ID NO: 1946
  Vibrio parahaemolyticus NIHCB0603

SEQ ID NO: 4648 - DNA, 31 bp, Vibrio parahaemolyticus; identical to SEQ ID NO: 1947
  Vibrio parahaemolyticus NIHCB0603

SEQ ID NO: 4649 - DNA, 31 bp, Vibrio parahaemolyticus; identical to SEQ ID NO: 1877
  Vibrio parahaemolyticus NIHCB0603

SEQ ID NO: 4650 - DNA, 31 bp, Vibrio parahaemolyticus; identical to SEQ ID NO: 1878
  Vibrio parahaemolyticus NIHCB0603

SEQ ID NO: 4651 - DNA, 28 bp, Vibrio parahaemolyticus
  Vibrio parahaemolyticus 949
gtgaactgccgaataggtagctgataat

SEQ ID NO: 4652 - DNA, 28 bp, Vibrio parahaemolyticus
  Vibrio parahaemolyticus 949
gtgaactgccgcataggtagagagaatc

SEQ ID NO: 4653 - DNA, 28 bp, Vibrio parahaemolyticus
  Vibrio parahaemolyticus 949
tcattactactaaaaagtagctgataac

SEQ ID NO: 4654 - DNA, 28 bp, Vibrio parahaemolyticus
  Vibrio parahaemolyticus 949
gaatactgccgaacaggtaggaggctca

SEQ ID NO: 4655 - DNA, 32 bp, Vibrio parahaemolyticus; identical to SEQ ID NO: 1946
  Vibrio parahaemolyticus 949

SEQ ID NO: 4656 - DNA, 31 bp, Vibrio parahaemolyticus; identical to SEQ ID NO: 1947
  Vibrio parahaemolyticus 949

SEQ ID NO: 4657 - DNA, 31 bp, Vibrio parahaemolyticus; identical to SEQ ID NO: 1877
  Vibrio parahaemolyticus 949

SEQ ID NO: 4658 - DNA, 31 bp, Vibrio parahaemolyticus; identical to SEQ ID NO: 1878
  Vibrio parahaemolyticus 949

SEQ ID NO: 4659 - DNA, 28 bp, Vibrio parahaemolyticus
  Vibrio parahaemolyticus VP2007-095
gtgaactgccgaataggtagctgataat

SEQ ID NO: 4660 - DNA, 28 bp, Vibrio parahaemolyticus
  Vibrio parahaemolyticus VP2007-095
gtgaactgccgcataggtagagaggatc

SEQ ID NO: 4661 - DNA, 28 bp, Vibrio parahaemolyticus
  Vibrio parahaemolyticus VP2007-095
tcatcactactgaaaagtagctgataac

SEQ ID NO: 4662 - DNA, 28 bp, Vibrio parahaemolyticus
  Vibrio parahaemolyticus VP2007-095
gaatactgccgaacaggtaggaggctca

SEQ ID NO: 4663 - DNA, 31 bp, Vibrio parahaemolyticus; identical to SEQ ID NO: 1876
  Vibrio parahaemolyticus VP2007-095

SEQ ID NO: 4664 - DNA, 31 bp, Vibrio parahaemolyticus; identical to SEQ ID NO: 1877
  Vibrio parahaemolyticus VP2007-095

SEQ ID NO: 4665 - DNA, 31 bp, Vibrio parahaemolyticus; identical to SEQ ID NO: 1878
  Vibrio parahaemolyticus VP2007-095

SEQ ID NO: 4666 - DNA, 28 bp, Vibrio parahaemolyticus
  Vibrio parahaemolyticus VP232
gtgaactgccgaataggtagctgataat

SEQ ID NO: 4667 - DNA, 28 bp, Vibrio parahaemolyticus
  Vibrio parahaemolyticus VP232
gtgaactgccgcataggtagagagaatc

SEQ ID NO: 4668 - DNA, 28 bp, Vibrio parahaemolyticus
  Vibrio parahaemolyticus VP232
tcattactactaaaaagtagctgataac

SEQ ID NO: 4669 - DNA, 28 bp, Vibrio parahaemolyticus
  Vibrio parahaemolyticus VP232
gaatactgccgaacaggtaggaggctca

SEQ ID NO: 4670 - DNA, 32 bp, Vibrio parahaemolyticus; identical to SEQ ID NO: 1946
  Vibrio parahaemolyticus VP232

SEQ ID NO: 4671 - DNA, 31 bp, Vibrio parahaemolyticus; identical to SEQ ID NO: 1947
  Vibrio parahaemolyticus VP232

SEQ ID NO: 4672 - DNA, 31 bp, Vibrio parahaemolyticus; identical to SEQ ID NO: 1877
  Vibrio parahaemolyticus VP232

SEQ ID NO: 4673 - DNA, 31 bp, Vibrio parahaemolyticus; identical to SEQ ID NO: 1878
  Vibrio parahaemolyticus VP232

SEQ ID NO: 4674 - DNA, 28 bp, Vibrio parahaemolyticus
  Vibrio parahaemolyticus Peru-288
gtgaactgccgaataggtagctgataat

SEQ ID NO: 4675 - DNA, 28 bp, Vibrio parahaemolyticus
  Vibrio parahaemolyticus Peru-288
gtgaactgccgcataggtagagagaatc

SEQ ID NO: 4676 - DNA, 28 bp, Vibrio parahaemolyticus
  Vibrio parahaemolyticus Peru-288
tcattactactaaaaagtagctgataac

SEQ ID NO: 4677 - DNA, 28 bp, Vibrio parahaemolyticus
  Vibrio parahaemolyticus Peru-288
gaatactgccgaacaggtaggaggctca

SEQ ID NO: 4678 - DNA, 32 bp, Vibrio parahaemolyticus; identical to SEQ ID NO: 1946
  Vibrio parahaemolyticus Peru-288

SEQ ID NO: 4679 - DNA, 31 bp, Vibrio parahaemolyticus; identical to SEQ ID NO: 1947
  Vibrio parahaemolyticus Peru-288

SEQ ID NO: 4680 - DNA, 31 bp, Vibrio parahaemolyticus; identical to SEQ ID NO: 1877
  Vibrio parahaemolyticus Peru-288

SEQ ID NO: 4681 - DNA, 31 bp, Vibrio parahaemolyticus; identical to SEQ ID NO: 1878
  Vibrio parahaemolyticus Peru-288

SEQ ID NO: 4682 - DNA, 28 bp, Vibrio parahaemolyticus
  Vibrio parahaemolyticus 861
gtgaactgccgaataggtagctgataat

SEQ ID NO: 4683 - DNA, 28 bp, Vibrio parahaemolyticus
  Vibrio parahaemolyticus 861
gtgaactgccgcataggtagagagaatc

SEQ ID NO: 4684 - DNA, 28 bp, Vibrio parahaemolyticus
  Vibrio parahaemolyticus 861
tcattactactaaaaagtagctgataac

SEQ ID NO: 4685 - DNA, 28 bp, Vibrio parahaemolyticus
  Vibrio parahaemolyticus 861
gaatactgccgaacaggtaggaggctca

SEQ ID NO: 4686 - DNA, 32 bp, Vibrio parahaemolyticus; identical to SEQ ID NO: 1946
  Vibrio parahaemolyticus 861

SEQ ID NO: 4687 - DNA, 31 bp, Vibrio parahaemolyticus; identical to SEQ ID NO: 1947
  Vibrio parahaemolyticus 861

SEQ ID NO: 4688 - DNA, 31 bp, Vibrio parahaemolyticus; identical to SEQ ID NO: 1877
  Vibrio parahaemolyticus 861

SEQ ID NO: 4689 - DNA, 31 bp, Vibrio parahaemolyticus; identical to SEQ ID NO: 1878
  Vibrio parahaemolyticus 861

SEQ ID NO: 4690 - DNA, 28 bp, Vibrio parahaemolyticus
  Vibrio parahaemolyticus V14/01
gtgaactgccgaataggtagctgataat

SEQ ID NO: 4691 - DNA, 28 bp, Vibrio parahaemolyticus
  Vibrio parahaemolyticus V14/01
gtgaactgccgcataggtagagagaatc

SEQ ID NO: 4692 - DNA, 28 bp, Vibrio parahaemolyticus
  Vibrio parahaemolyticus V14/01
tcattactactaaaaagtagctgataac

SEQ ID NO: 4693 - DNA, 28 bp, Vibrio parahaemolyticus
  Vibrio parahaemolyticus V14/01
gaatactgccgaacaggtaggaggctca

SEQ ID NO: 4694 - DNA, 32 bp, Vibrio parahaemolyticus; identical to SEQ ID NO: 1946
  Vibrio parahaemolyticus V14/01

SEQ ID NO: 4695 - DNA, 31 bp, Vibrio parahaemolyticus; identical to SEQ ID NO: 1947
  Vibrio parahaemolyticus V14/01

SEQ ID NO: 4696 - DNA, 31 bp, Vibrio parahaemolyticus; identical to SEQ ID NO: 1877
  Vibrio parahaemolyticus V14/01

SEQ ID NO: 4697 - DNA, 31 bp, Vibrio parahaemolyticus; identical to SEQ ID NO: 1878
  Vibrio parahaemolyticus V14/01

SEQ ID NO: 4698 - DNA, 28 bp, Vibrio parahaemolyticus
  Vibrio parahaemolyticus V-223/04
gtgaactgccgaataggtagctgataat

SEQ ID NO: 4699 - DNA, 28 bp, Vibrio parahaemolyticus
  Vibrio parahaemolyticus V-223/04
gtgaactgccgcataggtagagaggatc

SEQ ID NO: 4700 - DNA, 28 bp, Vibrio parahaemolyticus
  Vibrio parahaemolyticus V-223/04
gtgaactgccgcataggtagagagaatc

SEQ ID NO: 4701 - DNA, 28 bp, Vibrio parahaemolyticus
  Vibrio parahaemolyticus V-223/04
tcattactactaaaaagtagctgataac

SEQ ID NO: 4702 - DNA, 28 bp, Vibrio parahaemolyticus
  Vibrio parahaemolyticus V-223/04
gaatactgccgaacaggtaggaggctca

SEQ ID NO: 4703 - DNA, 31 bp, Vibrio parahaemolyticus; identical to SEQ ID NO: 1876
  Vibrio parahaemolyticus V-223/04

SEQ ID NO: 4704 - DNA, 32 bp, Vibrio parahaemolyticus; identical to SEQ ID NO: 1946
  Vibrio parahaemolyticus V-223/04

SEQ ID NO: 4705 - DNA, 31 bp, Vibrio parahaemolyticus; identical to SEQ ID NO: 1947
  Vibrio parahaemolyticus V-223/04

SEQ ID NO: 4706 - DNA, 31 bp, Vibrio parahaemolyticus; identical to SEQ ID NO: 1877
  Vibrio parahaemolyticus V-223/04

SEQ ID NO: 4707 - DNA, 31 bp, Vibrio parahaemolyticus; identical to SEQ ID NO: 1878
  Vibrio parahaemolyticus V-223/04

SEQ ID NO: 4708 - DNA, 28 bp, Vibrio parahaemolyticus
  Vibrio parahaemolyticus 10296
gtgaactgccgaataggtagctgataat

SEQ ID NO: 4709 - DNA, 28 bp, Vibrio parahaemolyticus
  Vibrio parahaemolyticus 10296
gtgaactgccgcataggtagagaggatc

SEQ ID NO: 4710 - DNA, 28 bp, Vibrio parahaemolyticus
  Vibrio parahaemolyticus 10296
tcatcactactgaaaagtagctgataac

SEQ ID NO: 4711 - DNA, 28 bp, Vibrio parahaemolyticus
  Vibrio parahaemolyticus 10296
gaatactgccgaacaggtaggaggctca

SEQ ID NO: 4712 - DNA, 31 bp, Vibrio parahaemolyticus; identical to SEQ ID NO: 1876
  Vibrio parahaemolyticus 10296

SEQ ID NO: 4713 - DNA, 31 bp, Vibrio parahaemolyticus; identical to SEQ ID NO: 1877
  Vibrio parahaemolyticus 10296

SEQ ID NO: 4714 - DNA, 31 bp, Vibrio parahaemolyticus; identical to SEQ ID NO: 1878
  Vibrio parahaemolyticus 10296

SEQ ID NO: 4715 - DNA, 28 bp, Vibrio parahaemolyticus
  Vibrio parahaemolyticus NCTC10884
gtgaactgccgaataggtagctgataat

SEQ ID NO: 4716 - DNA, 28 bp, Vibrio parahaemolyticus
  Vibrio parahaemolyticus NCTC10884
gtgaactgccgcataggtagagagaatc

SEQ ID NO: 4717 - DNA, 28 bp, Vibrio parahaemolyticus
  Vibrio parahaemolyticus NCTC10884
tcattactactaaaaagtagctgataac

SEQ ID NO: 4718 - DNA, 28 bp, Vibrio parahaemolyticus
  Vibrio parahaemolyticus NCTC10884
gaatactgccgaacaggtaggaggctca

SEQ ID NO: 4719 - DNA, 32 bp, Vibrio parahaemolyticus; identical to SEQ ID NO: 2035
  Vibrio parahaemolyticus NCTC10884

SEQ ID NO: 4720 - DNA, 31 bp, Vibrio parahaemolyticus; identical to SEQ ID NO: 1947
  Vibrio parahaemolyticus NCTC10884

SEQ ID NO: 4721 - DNA, 31 bp, Vibrio parahaemolyticus; identical to SEQ ID NO: 1877
  Vibrio parahaemolyticus NCTC10884

SEQ ID NO: 4722 - DNA, 31 bp, Vibrio parahaemolyticus; identical to SEQ ID NO: 1878
  Vibrio parahaemolyticus NCTC10884

SEQ ID NO: 4723 - DNA, 28 bp, Vibrio parahaemolyticus
  Vibrio parahaemolyticus FDA_R31
gtgaactgccgaataggtagctgataat

SEQ ID NO: 4724 - DNA, 28 bp, Vibrio parahaemolyticus
  Vibrio parahaemolyticus FDA_R31
atgaactgccgaataggtagagaggagc

SEQ ID NO: 4725 - DNA, 28 bp, Vibrio parahaemolyticus
  Vibrio parahaemolyticus FDA_R31
tcattactacttaaaagtagctgataac

SEQ ID NO: 4726 - DNA, 28 bp, Vibrio parahaemolyticus
  Vibrio parahaemolyticus FDA_R31
gaatactgccgaacaggtaggaggctca

SEQ ID NO: 4727 - DNA, 31 bp, Vibrio parahaemolyticus; identical to SEQ ID NO: 1897
  Vibrio parahaemolyticus FDA_R31

SEQ ID NO: 4728 - DNA, 31 bp, Vibrio parahaemolyticus; identical to SEQ ID NO: 1877
  Vibrio parahaemolyticus FDA_R31

SEQ ID NO: 4729 - DNA, 31 bp, Vibrio parahaemolyticus; identical to SEQ ID NO: 1970
  Vibrio parahaemolyticus FDA_R31

SEQ ID NO: 4730 - DNA, 28 bp, Vibrio parahaemolyticus
  Vibrio parahaemolyticus IDH02640
gtgaactgccgaataggtagctgataat

SEQ ID NO: 4731 - DNA, 28 bp, Vibrio parahaemolyticus
  Vibrio parahaemolyticus IDH02640
gtgaactgccgcataggtagagagaatc

SEQ ID NO: 4732 - DNA, 28 bp, Vibrio parahaemolyticus
  Vibrio parahaemolyticus IDH02640
tcattactactaaaaagtagctgataac

SEQ ID NO: 4733 - DNA, 28 bp, Vibrio parahaemolyticus
  Vibrio parahaemolyticus IDH02640
gaatactgccgaacaggtaggaggctca

SEQ ID NO: 4734 - DNA, 32 bp, Vibrio parahaemolyticus; identical to SEQ ID NO: 1946
  Vibrio parahaemolyticus IDH02640

SEQ ID NO: 4735 - DNA, 31 bp, Vibrio parahaemolyticus; identical to SEQ ID NO: 1947
  Vibrio parahaemolyticus IDH02640

SEQ ID NO: 4736 - DNA, 31 bp, Vibrio parahaemolyticus; identical to SEQ ID NO: 1877
  Vibrio parahaemolyticus IDH02640

SEQ ID NO: 4737 - DNA, 31 bp, Vibrio parahaemolyticus; identical to SEQ ID NO: 1878
  Vibrio parahaemolyticus IDH02640

SEQ ID NO: 4738 - DNA, 28 bp, Vibrio parahaemolyticus
  Vibrio parahaemolyticus VP-48
gtgaactgccgaataggtagctgataat

SEQ ID NO: 4739 - DNA, 28 bp, Vibrio parahaemolyticus
  Vibrio parahaemolyticus VP-48
gtgaactgccgcataggtagagagaatc

SEQ ID NO: 4740 - DNA, 28 bp, Vibrio parahaemolyticus
  Vibrio parahaemolyticus VP-48
tcattactactaaaaagtagctgataac

SEQ ID NO: 4741 - DNA, 28 bp, Vibrio parahaemolyticus
  Vibrio parahaemolyticus VP-48
gaatactgccgaacaggtaggaggctca

SEQ ID NO: 4742 - DNA, 32 bp, Vibrio parahaemolyticus; identical to SEQ ID NO: 1946
  Vibrio parahaemolyticus VP-48

SEQ ID NO: 4743 - DNA, 31 bp, Vibrio parahaemolyticus; identical to SEQ ID NO: 1947
  Vibrio parahaemolyticus VP-48

SEQ ID NO: 4744 - DNA, 31 bp, Vibrio parahaemolyticus; identical to SEQ ID NO: 1877
  Vibrio parahaemolyticus VP-48

SEQ ID NO: 4745 - DNA, 31 bp, Vibrio parahaemolyticus; identical to SEQ ID NO: 1878
  Vibrio parahaemolyticus VP-48

SEQ ID NO: 4746 - DNA, 28 bp, Vibrio parahaemolyticus
  Vibrio parahaemolyticus VPTS-2010
gttcgccgccgcataggcagctgataat

SEQ ID NO: 4747 - DNA, 28 bp, Vibrio parahaemolyticus
  Vibrio parahaemolyticus VPTS-2010
gttcgccgccgcataggcagatttaact

SEQ ID NO: 4748 - DNA, 32 bp, Vibrio parahaemolyticus; identical to SEQ ID NO: 3385
  Vibrio parahaemolyticus VPTS-2010

SEQ ID NO: 4749 - DNA, 28 bp, Vibrio hangzhouensis
  Vibrio hangzhouensis CGMCC 1.7062
gtgaactgccgagtaggtagctgataat

SEQ ID NO: 4750 - DNA, 28 bp, Vibrio hangzhouensis
  Vibrio hangzhouensis CGMCC 1.7062
gtgatctgccgagtaggtagctgataat

SEQ ID NO: 4751 - DNA, 28 bp, Vibrio hangzhouensis
  Vibrio hangzhouensis CGMCC 1.7062
gtgaactgccgagtaggtagagtacatt

SEQ ID NO: 4752 - DNA, 32 bp, Vibrio hangzhouensis
  Vibrio hangzhouensis CGMCC 1.7062
gtttcgcttacatgacgtgtgatagtaaaggt

SEQ ID NO: 4753 - DNA, 32 bp, Vibrio hangzhouensis
  Vibrio hangzhouensis CGMCC 1.7062
aacgacagtgaatttttggtaccgaagaaagc

SEQ ID NO: 4754 - DNA, 28 bp, Vibrio parahaemolyticus
  Vibrio parahaemolyticus HZ18-062
gtgaactgccgaataggtagctgataat

SEQ ID NO: 4755 - DNA, 28 bp, Vibrio parahaemolyticus
  Vibrio parahaemolyticus HZ18-062
gtgaactgccgcataggtagagagaatc

SEQ ID NO: 4756 - DNA, 28 bp, Vibrio parahaemolyticus
  Vibrio parahaemolyticus HZ18-062
tcattactactaaaaagtagctgataac

SEQ ID NO: 4757 - DNA, 28 bp, Vibrio parahaemolyticus
  Vibrio parahaemolyticus HZ18-062
gaatactgccgaacaggtaggaggctca

SEQ ID NO: 4758 - DNA, 32 bp, Vibrio parahaemolyticus; identical to SEQ ID NO: 2035
  Vibrio parahaemolyticus HZ18-062

SEQ ID NO: 4759 - DNA, 31 bp, Vibrio parahaemolyticus; identical to SEQ ID NO: 1947
  Vibrio parahaemolyticus HZ18-062

SEQ ID NO: 4760 - DNA, 31 bp, Vibrio parahaemolyticus; identical to SEQ ID NO: 1877
  Vibrio parahaemolyticus HZ18-062

SEQ ID NO: 4761 - DNA, 31 bp, Vibrio parahaemolyticus; identical to SEQ ID NO: 1878
  Vibrio parahaemolyticus HZ18-062

SEQ ID NO: 4762 - DNA, 28 bp, Vibrio cholerae
  Vibrio cholerae HE-45
gtgaactgccgagtaggtagctgataac

SEQ ID NO: 4763 - DNA, 28 bp, Vibrio cholerae
  Vibrio cholerae HE-45
gttaactgccgaataggtagctgataat

SEQ ID NO: 4764 - DNA, 28 bp, Vibrio cholerae
  Vibrio cholerae HE-45
gtgaactgccgagtaggcagagggcatc

SEQ ID NO: 4765 - DNA, 28 bp, Vibrio cholerae
  Vibrio cholerae HE-45
tcattactactgcaaagtagctgataac

SEQ ID NO: 4766 - DNA, 28 bp, Vibrio cholerae
  Vibrio cholerae HE-45
ctttactgctgaataagtagataactac

SEQ ID NO: 4767 - DNA, 32 bp, Vibrio cholerae
  Vibrio cholerae HE-45
ttacaggacgctttggcttcattgcttttcag

SEQ ID NO: 4768 - DNA, 32 bp, Vibrio cholerae; identical to SEQ ID NO: 4314
  Vibrio cholerae HE-45

SEQ ID NO: 4769 - DNA, 32 bp, Vibrio cholerae; identical to SEQ ID NO: 4315
  Vibrio cholerae HE-45

SEQ ID NO: 4770 - DNA, 32 bp, Vibrio cholerae; identical to SEQ ID NO: 3019
  Vibrio cholerae HE-45

SEQ ID NO: 4771 - DNA, 32 bp, Vibrio cholerae; identical to SEQ ID NO: 3472
  Vibrio cholerae HE-45

SEQ ID NO: 4772 - DNA, 28 bp, Vibrio sp.
  Vibrio sp. LJC006
gtgtactaccgcataggtagctgattat

SEQ ID NO: 4773 - DNA, 28 bp, Vibrio sp.
  Vibrio sp. LJC006
gtgtactaccacataggtagaatctatc

SEQ ID NO: 4774 - DNA, 28 bp, Vibrio sp.
  Vibrio sp. LJC006
cattactactgaaaatgtagctgattac

SEQ ID NO: 4775 - DNA, 28 bp, Vibrio sp.
  Vibrio sp. LJC006
acttactgccgaacaggtagatttcttt

SEQ ID NO: 4776 - DNA, 32 bp, Vibrio sp.
  Vibrio sp. LJC006
tatctgaagtaaatccattttactttcattta

SEQ ID NO: 4777 - DNA, 32 bp, Vibrio sp.
  Vibrio sp. LJC006
cggatgatattcaaacgcttcttgtatttttt

SEQ ID NO: 4778 - DNA, 31 bp, Vibrio sp.
  Vibrio sp. LJC006
aaacgaaccacatttactcgagttcgagatc

SEQ ID NO: 4779 - DNA, 31 bp, Vibrio sp.
  Vibrio sp. LJC006
aaacgcaccacatttatccgcgttcgcgagc

SEQ ID NO: 4780 - DNA, 28 bp, Vibrio sp.
  Vibrio sp. 10N.286.46.E4
gtgaactgccgaataggtagctgataat

SEQ ID NO: 4781 - DNA, 28 bp, Vibrio sp.
  Vibrio sp. 10N.286.46.E4
gtgaactgcagagtaggtaggcccccac

SEQ ID NO: 4782 - DNA, 28 bp, Vibrio sp.
  Vibrio sp. 10N.286.46.E4
tcaaacctactgaaaagtagttgataac

SEQ ID NO: 4783 - DNA, 28 bp, Vibrio sp.
  Vibrio sp. 10N.286.46.E4
attaactgctgaataagtagacacttta

SEQ ID NO: 4784 - DNA, 32 bp, Vibrio sp.
  Vibrio sp. 10N.286.46.E4
atagacagaattctatttgagtcgcttaagcg

SEQ ID NO: 4785 - DNA, 32 bp, Vibrio sp.; identical to SEQ ID NO: 2754
  Vibrio sp. 10N.286.46.E4

SEQ ID NO: 4786 - DNA, 32 bp, Vibrio sp.
  Vibrio sp. 10N.286.46.E4
aaacgaaccactttcatacaagttcaagagca

SEQ ID NO: 4787 - DNA, 32 bp, Vibrio sp.
  Vibrio sp. 10N.286.46.E4
aagcgtacaactttcatccgagtgcaagagca

SEQ ID NO: 4788 - DNA, 28 bp, Vibrio parahaemolyticus
  Vibrio parahaemolyticus 605
gtgaactgccgaataggtagctgataat

SEQ ID NO: 4789 - DNA, 28 bp, Vibrio parahaemolyticus
  Vibrio parahaemolyticus 605
gtgaactgccgcataggtagagagaatc

SEQ ID NO: 4790 - DNA, 28 bp, Vibrio parahaemolyticus
  Vibrio parahaemolyticus 605
tcattactactaaaaagtagctgataac

SEQ ID NO: 4791 - DNA, 28 bp, Vibrio parahaemolyticus
  Vibrio parahaemolyticus 605
gaatactgccgaacaggtaggaggctca

SEQ ID NO: 4792 - DNA, 32 bp, Vibrio parahaemolyticus; identical to SEQ ID NO: 1946
  Vibrio parahaemolyticus 605

SEQ ID NO: 4793 - DNA, 31 bp, Vibrio parahaemolyticus; identical to SEQ ID NO: 1947
  Vibrio parahaemolyticus 605

SEQ ID NO: 4794 - DNA, 31 bp, Vibrio parahaemolyticus; identical to SEQ ID NO: 1877
  Vibrio parahaemolyticus 605

SEQ ID NO: 4795 - DNA, 31 bp, Vibrio parahaemolyticus; identical to SEQ ID NO: 1878
  Vibrio parahaemolyticus 605

SEQ ID NO: 4796 - DNA, 28 bp, Vibrio anguillarum
  Vibrio anguillarum J360
gtgtactgccgagtaggtagctgataat

SEQ ID NO: 4797 - DNA, 28 bp, Vibrio anguillarum
  Vibrio anguillarum J360
gtgtactgccgagtaggtagagtgcacc

SEQ ID NO: 4798 - DNA, 32 bp, Vibrio anguillarum; identical to SEQ ID NO: 2227
  Vibrio anguillarum J360

SEQ ID NO: 4799 - DNA, 28 bp, Vibrio parahaemolyticus
  Vibrio parahaemolyticus Peru-466
gtgaactgccgaataggtagctgataat

SEQ ID NO: 4800 - DNA, 28 bp, Vibrio parahaemolyticus
  Vibrio parahaemolyticus Peru-466
gtgaactgccgcataggtagagagaatc

SEQ ID NO: 4801 - DNA, 28 bp, Vibrio parahaemolyticus
  Vibrio parahaemolyticus Peru-466
tcattactactaaaaagtagctgataac

SEQ ID NO: 4802 - DNA, 28 bp, Vibrio parahaemolyticus
  Vibrio parahaemolyticus Peru-466
gaatactgccgaacaggtaggaggctca

SEQ ID NO: 4803 - DNA, 32 bp, Vibrio parahaemolyticus; identical to SEQ ID NO: 1946
  Vibrio parahaemolyticus Peru-466

SEQ ID NO: 4804 - DNA, 31 bp, Vibrio parahaemolyticus; identical to SEQ ID NO: 1947
  Vibrio parahaemolyticus Peru-466

SEQ ID NO: 4805 - DNA, 31 bp, Vibrio parahaemolyticus; identical to SEQ ID NO: 1877
  Vibrio parahaemolyticus Peru-466

SEQ ID NO: 4806 - DNA, 31 bp, Vibrio parahaemolyticus; identical to SEQ ID NO: 1878
  Vibrio parahaemolyticus Peru-466

SEQ ID NO: 4807 - DNA, 28 bp, Vibrio parahaemolyticus
  Vibrio parahaemolyticus K5030
gtgaactgccgaataggtagctgataat

SEQ ID NO: 4808 - DNA, 28 bp, Vibrio parahaemolyticus
  Vibrio parahaemolyticus K5030
gtgaactgccgcataggtagagagaatc

SEQ ID NO: 4809 - DNA, 28 bp, Vibrio parahaemolyticus
  Vibrio parahaemolyticus K5030
tcattactactaaaaagtagctgataac

SEQ ID NO: 4810 - DNA, 28 bp, Vibrio parahaemolyticus
  Vibrio parahaemolyticus K5030
gaatactgccgaacaggtaggaggctca

SEQ ID NO: 4811 - DNA, 32 bp, Vibrio parahaemolyticus; identical to SEQ ID NO: 1946
  Vibrio parahaemolyticus K5030

SEQ ID NO: 4812 - DNA, 31 bp, Vibrio parahaemolyticus; identical to SEQ ID NO: 1947
  Vibrio parahaemolyticus K5030

SEQ ID NO: 4813 - DNA, 31 bp, Vibrio parahaemolyticus; identical to SEQ ID NO: 1877
  Vibrio parahaemolyticus K5030

SEQ ID NO: 4814 - DNA, 31 bp, Vibrio parahaemolyticus; identical to SEQ ID NO: 1878
  Vibrio parahaemolyticus K5030

SEQ ID NO: 4815 - DNA, 28 bp, Vibrio parahaemolyticus
  Vibrio parahaemolyticus BB22OP
gtgaactgccgaataggtagctgataat

SEQ ID NO: 4816 - DNA, 28 bp, Vibrio parahaemolyticus
  Vibrio parahaemolyticus BB22OP
gtgaactgccgcataggtagagagaatc

SEQ ID NO: 4817 - DNA, 28 bp, Vibrio parahaemolyticus
  Vibrio parahaemolyticus BB22OP
tcattactactaaaaagtagctgataac

SEQ ID NO: 4818 - DNA, 28 bp, Vibrio parahaemolyticus
  Vibrio parahaemolyticus BB22OP
gaatactgccgaacaggtaggaggctca

SEQ ID NO: 4819 - DNA, 32 bp, Vibrio parahaemolyticus; identical to SEQ ID NO: 2035
  Vibrio parahaemolyticus BB22OP

SEQ ID NO: 4820 - DNA, 31 bp, Vibrio parahaemolyticus; identical to SEQ ID NO: 1947
  Vibrio parahaemolyticus BB22OP

SEQ ID NO: 4821 - DNA, 31 bp, Vibrio parahaemolyticus; identical to SEQ ID NO: 1877
  Vibrio parahaemolyticus BB22OP

SEQ ID NO: 4822 - DNA, 31 bp, Vibrio parahaemolyticus; identical to SEQ ID NO: 1878
  Vibrio parahaemolyticus BB22OP

SEQ ID NO: 4823 - DNA, 28 bp, Vibrio parahaemolyticus
  Vibrio parahaemolyticus VP250
gtgaactgccgaataggtagctgataat

SEQ ID NO: 4824 - DNA, 28 bp, Vibrio parahaemolyticus
  Vibrio parahaemolyticus VP250
gtgaactgccgcataggtagagagaatc

SEQ ID NO: 4825 - DNA, 28 bp, Vibrio parahaemolyticus
  Vibrio parahaemolyticus VP250
tcattactactaaaaagtagctgataac

SEQ ID NO: 4826 - DNA, 28 bp, Vibrio parahaemolyticus
  Vibrio parahaemolyticus VP250
gaatactgccgaacaggtaggaggctca

SEQ ID NO: 4827 - DNA, 32 bp, Vibrio parahaemolyticus; identical to SEQ ID NO: 1946
  Vibrio parahaemolyticus VP250

SEQ ID NO: 4828 - DNA, 31 bp, Vibrio parahaemolyticus; identical to SEQ ID NO: 1947
  Vibrio parahaemolyticus VP250

SEQ ID NO: 4829 - DNA, 31 bp, Vibrio parahaemolyticus; identical to SEQ ID NO: 1877
  Vibrio parahaemolyticus VP250

SEQ ID NO: 4830 - DNA, 31 bp, Vibrio parahaemolyticus; identical to SEQ ID NO: 1878
  Vibrio parahaemolyticus VP250

SEQ ID NO: 4831 - DNA, 28 bp, Vibrio parahaemolyticus
  Vibrio parahaemolyticus IDH02189
gtgaactgccgaataggtagctgataat

SEQ ID NO: 4832 - DNA, 28 bp, Vibrio parahaemolyticus
  Vibrio parahaemolyticus IDH02189
gtgaactgccgcataggtagagagaatc

SEQ ID NO: 4833 - DNA, 28 bp, Vibrio parahaemolyticus
  Vibrio parahaemolyticus IDH02189
tcattactactaaaaagtagctgataac

SEQ ID NO: 4834 - DNA, 28 bp, Vibrio parahaemolyticus
  Vibrio parahaemolyticus IDH02189
gaatactgccgaacaggtaggaggctca

SEQ ID NO: 4835 - DNA, 32 bp, Vibrio parahaemolyticus; identical to SEQ ID NO: 1946
  Vibrio parahaemolyticus IDH02189

SEQ ID NO: 4836 - DNA, 31 bp, Vibrio parahaemolyticus; identical to SEQ ID NO: 1947
  Vibrio parahaemolyticus IDH02189

SEQ ID NO: 4837 - DNA, 31 bp, Vibrio parahaemolyticus; identical to SEQ ID NO: 1877
  Vibrio parahaemolyticus IDH02189

SEQ ID NO: 4838 - DNA, 31 bp, Vibrio parahaemolyticus; identical to SEQ ID NO: 1878
  Vibrio parahaemolyticus IDH02189

SEQ ID NO: 4839 - DNA, 28 bp, Vibrio parahaemolyticus
  Vibrio parahaemolyticus CFSAN007460
gtgaactgccgaataggtagctgataat

SEQ ID NO: 4840 - DNA, 28 bp, Vibrio parahaemolyticus
  Vibrio parahaemolyticus CFSAN007460
gtgaactgccgcataggtagagaggatc

SEQ ID NO: 4841 - DNA, 28 bp, Vibrio parahaemolyticus
  Vibrio parahaemolyticus CFSAN007460
tcatcactactgaaaagtagctgataac

SEQ ID NO: 4842 - DNA, 28 bp, Vibrio parahaemolyticus
  Vibrio parahaemolyticus CFSAN007460
gaatactgccgaacaggtaggaggctca

SEQ ID NO: 4843 - DNA, 31 bp, Vibrio parahaemolyticus; identical to SEQ ID NO: 1876
  Vibrio parahaemolyticus CFSAN007460

SEQ ID NO: 4844 - DNA, 31 bp, Vibrio parahaemolyticus; identical to SEQ ID NO: 1877
  Vibrio parahaemolyticus CFSAN007460

SEQ ID NO: 4845 - DNA, 31 bp, Vibrio parahaemolyticus; identical to SEQ ID NO: 1878
  Vibrio parahaemolyticus CFSAN007460

SEQ ID NO: 4846 - DNA, 28 bp, Vibrio parahaemolyticus
  Vibrio parahaemolyticus CFSAN001611
gtgaactgccgaataggtagctgataat

SEQ ID NO: 4847 - DNA, 28 bp, Vibrio parahaemolyticus
  Vibrio parahaemolyticus CFSAN001611
gtgaactgccgcataggtagagaggatc

SEQ ID NO: 4848 - DNA, 28 bp, Vibrio parahaemolyticus
  Vibrio parahaemolyticus CFSAN001611
tcatcactactgaaaagtagctgataac

SEQ ID NO: 4849 - DNA, 28 bp, Vibrio parahaemolyticus
  Vibrio parahaemolyticus CFSAN001611
gaatactgccgaacaggtaggaggctca

SEQ ID NO: 4850 - DNA, 31 bp, Vibrio parahaemolyticus; identical to SEQ ID NO: 1876
  Vibrio parahaemolyticus CFSAN001611

SEQ ID NO: 4851 - DNA, 31 bp, Vibrio parahaemolyticus; identical to SEQ ID NO: 1877
  Vibrio parahaemolyticus CFSAN001611

SEQ ID NO: 4852 - DNA, 31 bp, Vibrio parahaemolyticus; identical to SEQ ID NO: 1878
  Vibrio parahaemolyticus CFSAN001611

SEQ ID NO: 4853 - DNA, 28 bp, Vibrio parahaemolyticus
  Vibrio parahaemolyticus CFSAN006129
gtgaactgccgaataggtagctgataat

SEQ ID NO: 4854 - DNA, 28 bp, Vibrio parahaemolyticus
  Vibrio parahaemolyticus CFSAN006129
gtgaactgccgcataggtagagaggatc

SEQ ID NO: 4855 - DNA, 28 bp, Vibrio parahaemolyticus
  Vibrio parahaemolyticus CFSAN006129
tcatcactactgaaaagtagctgataac

SEQ ID NO: 4856 - DNA, 28 bp, Vibrio parahaemolyticus
  Vibrio parahaemolyticus CFSAN006129
gaatactgccgaacaggtaggaggctca

SEQ ID NO: 4857 - DNA, 31 bp, Vibrio parahaemolyticus; identical to SEQ ID NO: 1876
  Vibrio parahaemolyticus CFSAN006129

SEQ ID NO: 4858 - DNA, 31 bp, Vibrio parahaemolyticus; identical to SEQ ID NO: 1877
  Vibrio parahaemolyticus CFSAN006129

SEQ ID NO: 4859 - DNA, 31 bp, Vibrio parahaemolyticus; identical to SEQ ID NO: 1878
  Vibrio parahaemolyticus CFSAN006129

SEQ ID NO: 4860 - DNA, 28 bp, Vibrio parahaemolyticus
  Vibrio parahaemolyticus CFSAN001619
gtgaactgccgaataggtagctgataat

SEQ ID NO: 4861 - DNA, 28 bp, Vibrio parahaemolyticus
  Vibrio parahaemolyticus CFSAN001619
gtgaactgccgcataggtagagaggatc

SEQ ID NO: 4862 - DNA, 28 bp, Vibrio parahaemolyticus
  Vibrio parahaemolyticus CFSAN001619
tcatcactactgaaaagtagctgataac

SEQ ID NO: 4863 - DNA, 28 bp, Vibrio parahaemolyticus
  Vibrio parahaemolyticus CFSAN001619
gaatactgccgaacaggtaggaggctca

SEQ ID NO: 4864 - DNA, 31 bp, Vibrio parahaemolyticus; identical to SEQ ID NO: 1876
  Vibrio parahaemolyticus CFSAN001619

SEQ ID NO: 4865 - DNA, 31 bp, Vibrio parahaemolyticus; identical to SEQ ID NO: 1877
  Vibrio parahaemolyticus CFSAN001619

SEQ ID NO: 4866 - DNA, 28 bp, Vibrio parahaemolyticus
  Vibrio parahaemolyticus 98-513-F52
gtgaactgccgaataggtagctgataat

SEQ ID NO: 4867 - DNA, 28 bp, Vibrio parahaemolyticus
  Vibrio parahaemolyticus 98-513-F52
atgaactgccgaataggtagagaggagc

SEQ ID NO: 4868 - DNA, 28 bp, Vibrio parahaemolyticus
  Vibrio parahaemolyticus 98-513-F52
tcattactacttaaaagtagctgataac

SEQ ID NO: 4869 - DNA, 28 bp, Vibrio parahaemolyticus
  Vibrio parahaemolyticus 98-513-F52
gaatactgccgaacaggtaggaggctca

SEQ ID NO: 4870 - DNA, 31 bp, Vibrio parahaemolyticus; identical to SEQ ID NO: 1897
  Vibrio parahaemolyticus 98-513-F52

SEQ ID NO: 4871 - DNA, 31 bp, Vibrio parahaemolyticus; identical to SEQ ID NO: 1877
  Vibrio parahaemolyticus 98-513-F52

SEQ ID NO: 4872 - DNA, 31 bp, Vibrio parahaemolyticus; identical to SEQ ID NO: 1878
  Vibrio parahaemolyticus 98-513-F52

SEQ ID NO: 4873 - DNA, 28 bp, Vibrio parahaemolyticus
  Vibrio parahaemolyticus CFSAN007451
gtgaactgccgaataggtagctgataat

SEQ ID NO: 4874 - DNA, 28 bp, Vibrio parahaemolyticus
  Vibrio parahaemolyticus CFSAN007451
gtgaactgccgcataggtagagagaatc

SEQ ID NO: 4875 - DNA, 28 bp, Vibrio parahaemolyticus
  Vibrio parahaemolyticus CFSAN007451
tcattactactaaaaagtagctgataac

SEQ ID NO: 4876 - DNA, 28 bp, Vibrio parahaemolyticus
  Vibrio parahaemolyticus CFSAN007451
gaatactgccgaacaggtaggaggctca

SEQ ID NO: 4877 - DNA, 32 bp, Vibrio parahaemolyticus; identical to SEQ ID NO: 1946
  Vibrio parahaemolyticus CFSAN007451

SEQ ID NO: 4878 - DNA, 31 bp, Vibrio parahaemolyticus; identical to SEQ ID NO: 1947
  Vibrio parahaemolyticus CFSAN007451

SEQ ID NO: 4879 - DNA, 31 bp, Vibrio parahaemolyticus; identical to SEQ ID NO: 1877
  Vibrio parahaemolyticus CFSAN007451

SEQ ID NO: 4880 - DNA, 31 bp, Vibrio parahaemolyticus; identical to SEQ ID NO: 1878
  Vibrio parahaemolyticus CFSAN007451

SEQ ID NO: 4881 - DNA, 28 bp, Vibrio parahaemolyticus
  Vibrio parahaemolyticus CFSAN001614
gtgaactgccgaataggtagctgataat

SEQ ID NO: 4882 - DNA, 28 bp, Vibrio parahaemolyticus
  Vibrio parahaemolyticus CFSAN001614
gtgaactgccgcataggtagagaggatc

SEQ ID NO: 4883 - DNA, 28 bp, Vibrio parahaemolyticus
  Vibrio parahaemolyticus CFSAN001614
tcatcactactgaaaagtagctgataac

SEQ ID NO: 4884 - DNA, 28 bp, Vibrio parahaemolyticus
  Vibrio parahaemolyticus CFSAN001614
gaatactgccgaacaggtaggaggctca

SEQ ID NO: 4885 - DNA, 31 bp, Vibrio parahaemolyticus; identical to SEQ ID NO: 1876
  Vibrio parahaemolyticus CFSAN001614

SEQ ID NO: 4886 - DNA, 31 bp, Vibrio parahaemolyticus; identical to SEQ ID NO: 1877
  Vibrio parahaemolyticus CFSAN001614

SEQ ID NO: 4887 - DNA, 31 bp, Vibrio parahaemolyticus; identical to SEQ ID NO: 1878
  Vibrio parahaemolyticus CFSAN001614

SEQ ID NO: 4888 - DNA, 28 bp, Vibrio parahaemolyticus
  Vibrio parahaemolyticus 930
gtgaactgccgaataggtagctgataat

SEQ ID NO: 4889 - DNA, 28 bp, Vibrio parahaemolyticus
  Vibrio parahaemolyticus 930
gtgaactgccgcataggtagagagaatc

SEQ ID NO: 4890 - DNA, 28 bp, Vibrio parahaemolyticus
  Vibrio parahaemolyticus 930
tcattactactaaaaagtagctgataac

SEQ ID NO: 4891 - DNA, 28 bp, Vibrio parahaemolyticus
  Vibrio parahaemolyticus 930
gaatactgccgaacaggtaggaggctca

SEQ ID NO: 4892 - DNA, 32 bp, Vibrio parahaemolyticus; identical to SEQ ID NO: 1946
  Vibrio parahaemolyticus 930

SEQ ID NO: 4893 - DNA, 31 bp, Vibrio parahaemolyticus; identical to SEQ ID NO: 1947
  Vibrio parahaemolyticus 930

SEQ ID NO: 4894 - DNA, 31 bp, Vibrio parahaemolyticus; identical to SEQ ID NO: 1877
  Vibrio parahaemolyticus 930

SEQ ID NO: 4895 - DNA, 31 bp, Vibrio parahaemolyticus; identical to SEQ ID NO: 1878
  Vibrio parahaemolyticus 930

SEQ ID NO: 4896 - DNA, 28 bp, Vibrio parahaemolyticus
  Vibrio parahaemolyticus 12315
gtgaactgccgaataggtagctgataat

SEQ ID NO: 4897 - DNA, 28 bp, Vibrio parahaemolyticus
  Vibrio parahaemolyticus 12315
gtgaactgccgcataggtagagaggatc

SEQ ID NO: 4898 - DNA, 28 bp, Vibrio parahaemolyticus
  Vibrio parahaemolyticus 12315
tcatcactactgaaaagtagctgataac

SEQ ID NO: 4899 - DNA, 28 bp, Vibrio parahaemolyticus
  Vibrio parahaemolyticus 12315
gaatactgccgaacaggtaggaggctca

SEQ ID NO: 4900 - DNA, 31 bp, Vibrio parahaemolyticus; identical to SEQ ID NO: 1876
  Vibrio parahaemolyticus 12315

SEQ ID NO: 4901 - DNA, 31 bp, Vibrio parahaemolyticus; identical to SEQ ID NO: 1877
  Vibrio parahaemolyticus 12315

SEQ ID NO: 4902 - DNA, 31 bp, Vibrio parahaemolyticus; identical to SEQ ID NO: 1878
  Vibrio parahaemolyticus 12315

SEQ ID NO: 4903 - DNA, 28 bp, Vibrio parahaemolyticus
  Vibrio parahaemolyticus EN9701072
gtgaactgccgaataggtagctgataat

SEQ ID NO: 4904 - DNA, 28 bp, Vibrio parahaemolyticus
  Vibrio parahaemolyticus EN9701072
gtgaactgccgcataggtagagaggatc

SEQ ID NO: 4905 - DNA, 28 bp, Vibrio parahaemolyticus
  Vibrio parahaemolyticus EN9701072
tcatcactactgaaaagtagctgataac

SEQ ID NO: 4906 - DNA, 28 bp, Vibrio parahaemolyticus
  Vibrio parahaemolyticus EN9701072
gaatactgccgaacaggtaggaggctca

SEQ ID NO: 4907 - DNA, 31 bp, Vibrio parahaemolyticus; identical to SEQ ID NO: 1876
  Vibrio parahaemolyticus EN9701072

SEQ ID NO: 4908 - DNA, 31 bp, Vibrio parahaemolyticus; identical to SEQ ID NO: 1877
  Vibrio parahaemolyticus EN9701072

SEQ ID NO: 4909 - DNA, 31 bp, Vibrio parahaemolyticus; identical to SEQ ID NO: 1970
  Vibrio parahaemolyticus EN9701072

SEQ ID NO: 4910 - DNA, 28 bp, Vibrio parahaemolyticus
  Vibrio parahaemolyticus 876127
gtgaactgccgaataggtagctgataat

SEQ ID NO: 4911 - DNA, 28 bp, Vibrio parahaemolyticus
  Vibrio parahaemolyticus 876127
gtgaactgccgcataggtagagaggatc

SEQ ID NO: 4912 - DNA, 28 bp, Vibrio parahaemolyticus
  Vibrio parahaemolyticus 876127
tcatcactactgaaaagtagctgataac

SEQ ID NO: 4913 - DNA, 28 bp, Vibrio parahaemolyticus
  Vibrio parahaemolyticus 876127
gaatactgccgaacaggtaggaggctca

SEQ ID NO: 4914 - DNA, 31 bp, Vibrio parahaemolyticus; identical to SEQ ID NO: 1876
  Vibrio parahaemolyticus 876127

SEQ ID NO: 4915 - DNA, 31 bp, Vibrio parahaemolyticus; identical to SEQ ID NO: 1877
  Vibrio parahaemolyticus 876127

SEQ ID NO: 4916 - DNA, 31 bp, Vibrio parahaemolyticus; identical to SEQ ID NO: 1878
  Vibrio parahaemolyticus 876127

SEQ ID NO: 4917 - DNA, 28 bp, Vibrio parahaemolyticus
  Vibrio parahaemolyticus 872475
gtgaactgccgaataggtagctgataat

SEQ ID NO: 4918 - DNA, 28 bp, Vibrio parahaemolyticus
  Vibrio parahaemolyticus 872475
gtgaactgccgcataggtagagaggatc

SEQ ID NO: 4919 - DNA, 28 bp, Vibrio parahaemolyticus
  Vibrio parahaemolyticus 872475
tcatcactactgaaaagtagctgataac

SEQ ID NO: 4920 - DNA, 28 bp, Vibrio parahaemolyticus
  Vibrio parahaemolyticus 872475
gaatactgccgaacaggtaggaggctca

SEQ ID NO: 4921 - DNA, 31 bp, Vibrio parahaemolyticus; identical to SEQ ID NO: 1876
  Vibrio parahaemolyticus 872475

SEQ ID NO: 4922 - DNA, 31 bp, Vibrio parahaemolyticus; identical to SEQ ID NO: 1877
  Vibrio parahaemolyticus 872475

SEQ ID NO: 4923 - DNA, 31 bp, Vibrio parahaemolyticus; identical to SEQ ID NO: 1878
  Vibrio parahaemolyticus 872475

SEQ ID NO: 4924 - DNA, 28 bp, Vibrio parahaemolyticus
  Vibrio parahaemolyticus 857134
gtgaactgccgaataggtagctgataat

SEQ ID NO: 4925 - DNA, 28 bp, Vibrio parahaemolyticus
  Vibrio parahaemolyticus 857134
gtgaactgccgcataggtagagaggatc

SEQ ID NO: 4926 - DNA, 28 bp, Vibrio parahaemolyticus
  Vibrio parahaemolyticus 857134
tcatcactactgaaaagtagctgataac

SEQ ID NO: 4927 - DNA, 28 bp, Vibrio parahaemolyticus
  Vibrio parahaemolyticus 857134
gaatactgccgaacaggtaggaggctca

SEQ ID NO: 4928 - DNA, 31 bp, Vibrio parahaemolyticus; identical to SEQ ID NO: 1876
  Vibrio parahaemolyticus 857134

SEQ ID NO: 4929 - DNA, 31 bp, Vibrio parahaemolyticus; identical to SEQ ID NO: 1877
  Vibrio parahaemolyticus 857134

SEQ ID NO: 4930 - DNA, 31 bp, Vibrio parahaemolyticus; identical to SEQ ID NO: 1878
  Vibrio parahaemolyticus 857134

SEQ ID NO: 4931 - DNA, 28 bp, Vibrio parahaemolyticus
  Vibrio parahaemolyticus 480905
gtgaactgccgaataggtagctgataat

SEQ ID NO: 4932 - DNA, 28 bp, Vibrio parahaemolyticus
  Vibrio parahaemolyticus 480905
gtgaactgccgcataggtagagaggatc

SEQ ID NO: 4933 - DNA, 28 bp, Vibrio parahaemolyticus
  Vibrio parahaemolyticus 480905
tcatcactactgaaaagtagctgataac

SEQ ID NO: 4934 - DNA, 28 bp, Vibrio parahaemolyticus
  Vibrio parahaemolyticus 480905
gaatactgccgaacaggtaggaggctca

SEQ ID NO: 4935 - DNA, 31 bp, Vibrio parahaemolyticus; identical to SEQ ID NO: 1876
  Vibrio parahaemolyticus 480905

SEQ ID NO: 4936 - DNA, 31 bp, Vibrio parahaemolyticus; identical to SEQ ID NO: 1877
  Vibrio parahaemolyticus 480905

SEQ ID NO: 4937 - DNA, 31 bp, Vibrio parahaemolyticus; identical to SEQ ID NO: 1878
  Vibrio parahaemolyticus 480905

SEQ ID NO: 4938 - DNA, 28 bp, Vibrio parahaemolyticus
  Vibrio parahaemolyticus 926135
gtgaactgccgaataggtagctgataat

SEQ ID NO: 4939 - DNA, 28 bp, Vibrio parahaemolyticus
  Vibrio parahaemolyticus 926135
gtgaactgccgcataggtagagagaatc

SEQ ID NO: 4940 - DNA, 28 bp, Vibrio parahaemolyticus
  Vibrio parahaemolyticus 926135
tcattactactaaaaagtagctgataac

SEQ ID NO: 4941 - DNA, 28 bp, Vibrio parahaemolyticus
  Vibrio parahaemolyticus 926135
gaatactgccgaacaggtaggaggctca

SEQ ID NO: 4942 - DNA, 32 bp, Vibrio parahaemolyticus; identical to SEQ ID NO: 1946
  Vibrio parahaemolyticus 926135

SEQ ID NO: 4943 - DNA, 31 bp, Vibrio parahaemolyticus; identical to SEQ ID NO: 1947
  Vibrio parahaemolyticus 926135

SEQ ID NO: 4944 - DNA, 31 bp, Vibrio parahaemolyticus; identical to SEQ ID NO: 1877
  Vibrio parahaemolyticus 926135

SEQ ID NO: 4945 - DNA, 31 bp, Vibrio parahaemolyticus; identical to SEQ ID NO: 1878
  Vibrio parahaemolyticus 926135

SEQ ID NO: 4946 - DNA, 28 bp, Vibrio parahaemolyticus
  Vibrio parahaemolyticus 860421
gtgaactgccgaataggtagctgataat

SEQ ID NO: 4947 - DNA, 28 bp, Vibrio parahaemolyticus
  Vibrio parahaemolyticus 860421
gtgaactgccgcataggtagagaggatc

SEQ ID NO: 4948 - DNA, 28 bp, Vibrio parahaemolyticus
  Vibrio parahaemolyticus 860421
tcatcactactgaaaagtagctgataac

SEQ ID NO: 4949 - DNA, 28 bp, Vibrio parahaemolyticus
  Vibrio parahaemolyticus 860421
gaatactgccgaacaggtaggaggctca

SEQ ID NO: 4950 - DNA, 31 bp, Vibrio parahaemolyticus; identical to SEQ ID NO: 1876
  Vibrio parahaemolyticus 860421

SEQ ID NO: 4951 - DNA, 31 bp, Vibrio parahaemolyticus; identical to SEQ ID NO: 1877
  Vibrio parahaemolyticus 860421

SEQ ID NO: 4952 - DNA, 31 bp, Vibrio parahaemolyticus; identical to SEQ ID NO: 1970
  Vibrio parahaemolyticus 860421

SEQ ID NO: 4953 - DNA, 28 bp, Vibrio parahaemolyticus
  Vibrio parahaemolyticus MAVP-45
gtgaactgccgaataggtagctgataat

SEQ ID NO: 4954 - DNA, 28 bp, Vibrio parahaemolyticus
  Vibrio parahaemolyticus MAVP-45
gtgaactgccgcataggtagagaggatc

SEQ ID NO: 4955 - DNA, 28 bp, Vibrio parahaemolyticus
  Vibrio parahaemolyticus MAVP-45
tcatcactactgaaaagtagctgataac

SEQ ID NO: 4956 - DNA, 28 bp, Vibrio parahaemolyticus
  Vibrio parahaemolyticus MAVP-45
gaatactgccgaacaggtaggaggctca

SEQ ID NO: 4957 - DNA, 31 bp, Vibrio parahaemolyticus; identical to SEQ ID NO: 1876
  Vibrio parahaemolyticus MAVP-45

SEQ ID NO: 4958 - DNA, 31 bp, Vibrio parahaemolyticus; identical to SEQ ID NO: 1877
  Vibrio parahaemolyticus MAVP-45

SEQ ID NO: 4959 - DNA, 31 bp, Vibrio parahaemolyticus; identical to SEQ ID NO: 1878
  Vibrio parahaemolyticus MAVP-45

SEQ ID NO: 4960 - DNA, 28 bp, Vibrio parahaemolyticus
  Vibrio parahaemolyticus S349-10
gtgaactgccgaataggtagctgataat

SEQ ID NO: 4961 - DNA, 28 bp, Vibrio parahaemolyticus
  Vibrio parahaemolyticus S349-10
gtgaactgccgcataggtagagaggagc

SEQ ID NO: 4962 - DNA, 28 bp, Vibrio parahaemolyticus
  Vibrio parahaemolyticus S349-10
tcattgctactgaaaagtagctgatcac

SEQ ID NO: 4963 - DNA, 28 bp, Vibrio parahaemolyticus
  Vibrio parahaemolyticus S349-10
gaatactgccgaacaggtaggaggctca

SEQ ID NO: 4964 - DNA, 32 bp, Vibrio parahaemolyticus; identical to SEQ ID NO: 2814
  Vibrio parahaemolyticus S349-10

SEQ ID NO: 4965 - DNA, 31 bp, Vibrio parahaemolyticus; identical to SEQ ID NO: 1877
  Vibrio parahaemolyticus S349-10

SEQ ID NO: 4966 - DNA, 31 bp, Vibrio parahaemolyticus; identical to SEQ ID NO: 1970
  Vibrio parahaemolyticus S349-10

SEQ ID NO: 4967 - DNA, 28 bp, Vibrio parahaemolyticus
  Vibrio parahaemolyticus PMC58.7
gtgaactgccgaataggtagctgataat

SEQ ID NO: 4968 - DNA, 28 bp, Vibrio parahaemolyticus
  Vibrio parahaemolyticus PMC58.7
gtgaactgccgcataggtagagagaatc

SEQ ID NO: 4969 - DNA, 28 bp, Vibrio parahaemolyticus
  Vibrio parahaemolyticus PMC58.7
tcattactactaaaaagtagctgataac

SEQ ID NO: 4970 - DNA, 28 bp, Vibrio parahaemolyticus
  Vibrio parahaemolyticus PMC58.7
gaatactgccgaacaggtaggaggctca

SEQ ID NO: 4971 - DNA, 32 bp, Vibrio parahaemolyticus; identical to SEQ ID NO: 1946
  Vibrio parahaemolyticus PMC58.7

SEQ ID NO: 4972 - DNA, 31 bp, Vibrio parahaemolyticus; identical to SEQ ID NO: 1947
  Vibrio parahaemolyticus PMC58.7

SEQ ID NO: 4973 - DNA, 31 bp, Vibrio parahaemolyticus; identical to SEQ ID NO: 1877
  Vibrio parahaemolyticus PMC58.7

SEQ ID NO: 4974 - DNA, 31 bp, Vibrio parahaemolyticus; identical to SEQ ID NO: 1878
  Vibrio parahaemolyticus PMC58.7

SEQ ID NO: 4975 - DNA, 28 bp, Vibrio parahaemolyticus
  Vibrio parahaemolyticus PMC48
gtgaactgccgaataggtagctgataat

SEQ ID NO: 4976 - DNA, 28 bp, Vibrio parahaemolyticus
  Vibrio parahaemolyticus PMC48
gtgaactgccgcataggtagagagaatc

SEQ ID NO: 4977 - DNA, 28 bp, Vibrio parahaemolyticus
  Vibrio parahaemolyticus PMC48
tcattactactaaaaagtagctgataac

SEQ ID NO: 4978 - DNA, 28 bp, Vibrio parahaemolyticus
  Vibrio parahaemolyticus PMC48
gaatactgccgaacaggtaggaggctca

SEQ ID NO: 4979 - DNA, 32 bp, Vibrio parahaemolyticus; identical to SEQ ID NO: 1946
  Vibrio parahaemolyticus PMC48

SEQ ID NO: 4980 - DNA, 31 bp, Vibrio parahaemolyticus; identical to SEQ ID NO: 1947
  Vibrio parahaemolyticus PMC48

SEQ ID NO: 4981 - DNA, 31 bp, Vibrio parahaemolyticus; identical to SEQ ID NO: 1877
  Vibrio parahaemolyticus PMC48

SEQ ID NO: 4982 - DNA, 31 bp, Vibrio parahaemolyticus; identical to SEQ ID NO: 1878
  Vibrio parahaemolyticus PMC48

SEQ ID NO: 4983 - DNA, 28 bp, Vibrio parahaemolyticus
  Vibrio parahaemolyticus Gxw_7004
gtgaactgccgaataggtagctgataat

SEQ ID NO: 4984 - DNA, 28 bp, Vibrio parahaemolyticus
  Vibrio parahaemolyticus Gxw_7004
gtgaactgccgcataggtagagagaatc

SEQ ID NO: 4985 - DNA, 28 bp, Vibrio parahaemolyticus
  Vibrio parahaemolyticus Gxw_7004
tcattactactaaaaagtagctgataac

SEQ ID NO: 4986 - DNA, 28 bp, Vibrio parahaemolyticus
  Vibrio parahaemolyticus Gxw_7004
gaatactgccgaacaggtaggaggctca

SEQ ID NO: 4987 - DNA, 32 bp, Vibrio parahaemolyticus; identical to SEQ ID NO: 1946
  Vibrio parahaemolyticus Gxw_7004

SEQ ID NO: 4988 - DNA, 31 bp, Vibrio parahaemolyticus; identical to SEQ ID NO: 1947
  Vibrio parahaemolyticus Gxw_7004

SEQ ID NO: 4989 - DNA, 31 bp, Vibrio parahaemolyticus; identical to SEQ ID NO: 1877
  Vibrio parahaemolyticus Gxw_7004

SEQ ID NO: 4990 - DNA, 31 bp, Vibrio parahaemolyticus; identical to SEQ ID NO: 1878
  Vibrio parahaemolyticus Gxw_7004

SEQ ID NO: 4991 - DNA, 28 bp, Vibrio parahaemolyticus
  Vibrio parahaemolyticus 450466
gtgaactgccgaataggtagctgataat

SEQ ID NO: 4992 - DNA, 28 bp, Vibrio parahaemolyticus
  Vibrio parahaemolyticus 450466
gtgaactgccgcataggtagagaggatc

SEQ ID NO: 4993 - DNA, 28 bp, Vibrio parahaemolyticus
  Vibrio parahaemolyticus 450466
tcatcactactgaaaagtagctgataac

SEQ ID NO: 4994 - DNA, 28 bp, Vibrio parahaemolyticus
  Vibrio parahaemolyticus 450466
gaatactgccgaacaggtaggaggctca

SEQ ID NO: 4995 - DNA, 31 bp, Vibrio parahaemolyticus; identical to SEQ ID NO: 1876
  Vibrio parahaemolyticus 450466

SEQ ID NO: 4996 - DNA, 31 bp, Vibrio parahaemolyticus; identical to SEQ ID NO: 1877
  Vibrio parahaemolyticus 450466

SEQ ID NO: 4997 - DNA, 31 bp, Vibrio parahaemolyticus; identical to SEQ ID NO: 1970
  Vibrio parahaemolyticus 450466

SEQ ID NO: 4998 - DNA, 28 bp, Vibrio parahaemolyticus
  Vibrio parahaemolyticus A0EZ608
gtgaactgccgaataggtagctgataat

SEQ ID NO: 4999 - DNA, 28 bp, Vibrio parahaemolyticus
  Vibrio parahaemolyticus A0EZ608
gtgaactgccgcataggtagagaggatc

SEQ ID NO: 5000 - DNA, 28 bp, Vibrio parahaemolyticus
  Vibrio parahaemolyticus A0EZ608
tcatcactactgaaaagtagctgataac

SEQ ID NO: 5001 - DNA, 28 bp, Vibrio parahaemolyticus
  Vibrio parahaemolyticus A0EZ608
gaatactgccgaacaggtaggaggctca

SEQ ID NO: 5002 - DNA, 31 bp, Vibrio parahaemolyticus; identical to SEQ ID NO: 1876
  Vibrio parahaemolyticus A0EZ608

SEQ ID NO: 5003 - DNA, 31 bp, Vibrio parahaemolyticus; identical to SEQ ID NO: 1877
  Vibrio parahaemolyticus A0EZ608

SEQ ID NO: 5004 - DNA, 31 bp, Vibrio parahaemolyticus; identical to SEQ ID NO: 1878
  Vibrio parahaemolyticus A0EZ608

SEQ ID NO: 5005 - DNA, 28 bp, Vibrio parahaemolyticus
  Vibrio parahaemolyticus A0EZ713
gtgaactgccgaataggtagctgataat

SEQ ID NO: 5006 - DNA, 28 bp, Vibrio parahaemolyticus
  Vibrio parahaemolyticus A0EZ713
gtgaactgccgcataggtagagaggatc

SEQ ID NO: 5007 - DNA, 28 bp, Vibrio parahaemolyticus
  Vibrio parahaemolyticus A0EZ713
tcatcactactgaaaagtagctgataac

SEQ ID NO: 5008 - DNA, 28 bp, Vibrio parahaemolyticus
  Vibrio parahaemolyticus A0EZ713
gaatactgccgaacaggtaggaggctca

SEQ ID NO: 5009 - DNA, 31 bp, Vibrio parahaemolyticus; identical to SEQ ID NO: 1876
  Vibrio parahaemolyticus A0EZ713

SEQ ID NO: 5010 - DNA, 31 bp, Vibrio parahaemolyticus; identical to SEQ ID NO: 1877
  Vibrio parahaemolyticus A0EZ713

SEQ ID NO: 5011 - DNA, 31 bp, Vibrio parahaemolyticus; identical to SEQ ID NO: 1970
  Vibrio parahaemolyticus A0EZ713

SEQ ID NO: 5012 - DNA, 28 bp, Vibrio parahaemolyticus
  Vibrio parahaemolyticus F30368
gtgaactgccgaataggtagctgataat

SEQ ID NO: 5013 - DNA, 28 bp, Vibrio parahaemolyticus
  Vibrio parahaemolyticus F30368
gtgaactgccgcataggtagagagaatc

SEQ ID NO: 5014 - DNA, 28 bp, Vibrio parahaemolyticus
  Vibrio parahaemolyticus F30368
tcattactactaaaaaggagctgataac

SEQ ID NO: 5015 - DNA, 28 bp, Vibrio parahaemolyticus
  Vibrio parahaemolyticus F30368
gaatactgccgaacaggtaggaggctca

SEQ ID NO: 5016 - DNA, 31 bp, Vibrio parahaemolyticus; identical to SEQ ID NO: 1947
  Vibrio parahaemolyticus F30368

SEQ ID NO: 5017 - DNA, 31 bp, Vibrio parahaemolyticus; identical to SEQ ID NO: 1877
  Vibrio parahaemolyticus F30368

SEQ ID NO: 5018 - DNA, 31 bp, Vibrio parahaemolyticus; identical to SEQ ID NO: 2038
  Vibrio parahaemolyticus F30368

SEQ ID NO: 5019 - DNA, 28 bp, Vibrio parahaemolyticus
  Vibrio parahaemolyticus H18983
gtgaactgccgaataggtagctgataat

SEQ ID NO: 5020 - DNA, 28 bp, Vibrio parahaemolyticus
  Vibrio parahaemolyticus H18983
gtgaactgccgcataggtagagaggatc

SEQ ID NO: 5021 - DNA, 28 bp, Vibrio parahaemolyticus
  Vibrio parahaemolyticus H18983
tcatcactactgaaaagtagctgataac

SEQ ID NO: 5022 - DNA, 28 bp, Vibrio parahaemolyticus
  Vibrio parahaemolyticus H18983
gaatactgccgaacaggtaggaggctca

SEQ ID NO: 5023 - DNA, 31 bp, Vibrio parahaemolyticus; identical to SEQ ID NO: 1876
  Vibrio parahaemolyticus H18983

SEQ ID NO: 5024 - DNA, 31 bp, Vibrio parahaemolyticus; identical to SEQ ID NO: 1877
  Vibrio parahaemolyticus H18983

SEQ ID NO: 5025 - DNA, 31 bp, Vibrio parahaemolyticus; identical to SEQ ID NO: 1878
  Vibrio parahaemolyticus H18983

SEQ ID NO: 5026 - DNA, 28 bp, Vibrio parahaemolyticus
  Vibrio parahaemolyticus A3EZ711
gtgaactgccgaataggtagctgataat

SEQ ID NO: 5027 - DNA, 28 bp, Vibrio parahaemolyticus
  Vibrio parahaemolyticus A3EZ711
gtgaactgccgcataggtagagaggatc

SEQ ID NO: 5028 - DNA, 28 bp, Vibrio parahaemolyticus
  Vibrio parahaemolyticus A3EZ711
tcatcactactgaaaagtagctgataac

SEQ ID NO: 5029 - DNA, 28 bp, Vibrio parahaemolyticus
  Vibrio parahaemolyticus A3EZ711
gaatactgccgaacaggtaggaggctca

SEQ ID NO: 5030 - DNA, 31 bp, Vibrio parahaemolyticus; identical to SEQ ID NO: 1876
  Vibrio parahaemolyticus A3EZ711

SEQ ID NO: 5031 - DNA, 31 bp, Vibrio parahaemolyticus; identical to SEQ ID NO: 1877
  Vibrio parahaemolyticus A3EZ711

SEQ ID NO: 5032 - DNA, 31 bp, Vibrio parahaemolyticus; identical to SEQ ID NO: 1970
  Vibrio parahaemolyticus A3EZ711

SEQ ID NO: 5033 - DNA, 28 bp, Vibrio parahaemolyticus
  Vibrio parahaemolyticus A1EZ679
gtgaactgccgaataggtagctgataat

SEQ ID NO: 5034 - DNA, 28 bp, Vibrio parahaemolyticus
  Vibrio parahaemolyticus A1EZ679
gtgaactgccgcataggtagagaggatc

SEQ ID NO: 5035 - DNA, 28 bp, Vibrio parahaemolyticus
  Vibrio parahaemolyticus A1EZ679
tcatcactactgaaaagtagctgataac

SEQ ID NO: 5036 - DNA, 28 bp, Vibrio parahaemolyticus
  Vibrio parahaemolyticus A1EZ679
gaatactgccgaacaggtaggaggctca

SEQ ID NO: 5037 - DNA, 31 bp, Vibrio parahaemolyticus; identical to SEQ ID NO: 1876
  Vibrio parahaemolyticus A1EZ679

SEQ ID NO: 5038 - DNA, 31 bp, Vibrio parahaemolyticus; identical to SEQ ID NO: 1877
  Vibrio parahaemolyticus A1EZ679

SEQ ID NO: 5039 - DNA, 31 bp, Vibrio parahaemolyticus; identical to SEQ ID NO: 1878
  Vibrio parahaemolyticus A1EZ679

SEQ ID NO: 5040 - DNA, 28 bp, Vibrio parahaemolyticus
  Vibrio parahaemolyticus A3EZ799
gtgaactgccgaataggtagctgataat

SEQ ID NO: 5041 - DNA, 28 bp, Vibrio parahaemolyticus
  Vibrio parahaemolyticus A3EZ799
gtgaactgccgcataggtagagaggatc

SEQ ID NO: 5042 - DNA, 28 bp, Vibrio parahaemolyticus
  Vibrio parahaemolyticus A3EZ799
tcatcactactgaaaagtagctgataac

SEQ ID NO: 5043 - DNA, 28 bp, Vibrio parahaemolyticus
  Vibrio parahaemolyticus A3EZ799
gaatactgccgaacaggtaggaggctca

SEQ ID NO: 5044 - DNA, 31 bp, Vibrio parahaemolyticus; identical to SEQ ID NO: 1876
  Vibrio parahaemolyticus A3EZ799

SEQ ID NO: 5045 - DNA, 31 bp, Vibrio parahaemolyticus; identical to SEQ ID NO: 1877
  Vibrio parahaemolyticus A3EZ799

SEQ ID NO: 5046 - DNA, 31 bp, Vibrio parahaemolyticus; identical to SEQ ID NO: 1970
  Vibrio parahaemolyticus A3EZ799

SEQ ID NO: 5047 - DNA, 28 bp, Vibrio parahaemolyticus
  Vibrio parahaemolyticus C143
gtgaactgccgaataggtagctgataat

SEQ ID NO: 5048 - DNA, 28 bp, Vibrio parahaemolyticus
  Vibrio parahaemolyticus C143
gtgaactgccgcataggtagagaggatc

SEQ ID NO: 5049 - DNA, 28 bp, Vibrio parahaemolyticus
  Vibrio parahaemolyticus C143
tcatcactactgaaaagtagctgataac

SEQ ID NO: 5050 - DNA, 28 bp, Vibrio parahaemolyticus
  Vibrio parahaemolyticus C143
gaatactgccgaacaggtaggaggctca

SEQ ID NO: 5051 - DNA, 31 bp, Vibrio parahaemolyticus; identical to SEQ ID NO: 1876
  Vibrio parahaemolyticus C143

SEQ ID NO: 5052 - DNA, 31 bp, Vibrio parahaemolyticus; identical to SEQ ID NO: 1877
  Vibrio parahaemolyticus C143

SEQ ID NO: 5053 - DNA, 31 bp, Vibrio parahaemolyticus; identical to SEQ ID NO: 1878
  Vibrio parahaemolyticus C143

SEQ ID NO: 5054 - DNA, 28 bp, Vibrio parahaemolyticus
  Vibrio parahaemolyticus C148
gtgaactgccgaataggtagctgataat

SEQ ID NO: 5055 - DNA, 28 bp, Vibrio parahaemolyticus
  Vibrio parahaemolyticus C148
gtgaactgccgcataggtagagaggatc

SEQ ID NO: 5056 - DNA, 28 bp, Vibrio parahaemolyticus
  Vibrio parahaemolyticus C148
tcatcactactgaaaagtagctgataac

SEQ ID NO: 5057 - DNA, 28 bp, Vibrio parahaemolyticus
  Vibrio parahaemolyticus C148
gaatactgccgaacaggtaggaggctca

SEQ ID NO: 5058 - DNA, 31 bp, Vibrio parahaemolyticus; identical to SEQ ID NO: 1876
  Vibrio parahaemolyticus C148

SEQ ID NO: 5059 - DNA, 31 bp, Vibrio parahaemolyticus; identical to SEQ ID NO: 1877
  Vibrio parahaemolyticus C148

SEQ ID NO: 5060 - DNA, 31 bp, Vibrio parahaemolyticus; identical to SEQ ID NO: 1970
  Vibrio parahaemolyticus C148

SEQ ID NO: 5061 - DNA, 28 bp, Vibrio parahaemolyticus
  Vibrio parahaemolyticus A5Z853
gtgaactgccgaataggtagctgataat

SEQ ID NO: 5062 - DNA, 28 bp, Vibrio parahaemolyticus
  Vibrio parahaemolyticus A5Z853
gtgaactgccgcataggtagagagaatc

SEQ ID NO: 5063 - DNA, 28 bp, Vibrio parahaemolyticus
  Vibrio parahaemolyticus A5Z853
tcattactactaaaaagtagctgataac

SEQ ID NO: 5064 - DNA, 28 bp, Vibrio parahaemolyticus
  Vibrio parahaemolyticus A5Z853
gaatactgccgaacaggtaggaggctca

SEQ ID NO: 5065 - DNA, 32 bp, Vibrio parahaemolyticus; identical to SEQ ID NO: 1946
  Vibrio parahaemolyticus A5Z853

SEQ ID NO: 5066 - DNA, 31 bp, Vibrio parahaemolyticus; identical to SEQ ID NO: 1947
  Vibrio parahaemolyticus A5Z853

SEQ ID NO: 5067 - DNA, 31 bp, Vibrio parahaemolyticus; identical to SEQ ID NO: 1877
  Vibrio parahaemolyticus A5Z853

SEQ ID NO: 5068 - DNA, 31 bp, Vibrio parahaemolyticus; identical to SEQ ID NO: 1878
  Vibrio parahaemolyticus A5Z853

SEQ ID NO: 5069 - DNA, 28 bp, Vibrio parahaemolyticus
  Vibrio parahaemolyticus A5Z905
gtgaactgccgaataggtagctgataat

SEQ ID NO: 5070 - DNA, 28 bp, Vibrio parahaemolyticus
  Vibrio parahaemolyticus A5Z905
gtgaactgccgcataggtagagaggatc

SEQ ID NO: 5071 - DNA, 28 bp, Vibrio parahaemolyticus
  Vibrio parahaemolyticus A5Z905
tcatcactactgaaaagtagctgataac

SEQ ID NO: 5072 - DNA, 28 bp, Vibrio parahaemolyticus
  Vibrio parahaemolyticus A5Z905
gaatactgccgaacaggtaggaggctca

SEQ ID NO: 5073 - DNA, 31 bp, Vibrio parahaemolyticus; identical to SEQ ID NO: 1876
  Vibrio parahaemolyticus A5Z905

SEQ ID NO: 5074 - DNA, 31 bp, Vibrio parahaemolyticus; identical to SEQ ID NO: 1877
  Vibrio parahaemolyticus A5Z905

SEQ ID NO: 5075 - DNA, 31 bp, Vibrio parahaemolyticus; identical to SEQ ID NO: 1878
  Vibrio parahaemolyticus A5Z905

SEQ ID NO: 5076 - DNA, 28 bp, Vibrio parahaemolyticus
  Vibrio parahaemolyticus CFSAN025062
gtgaactgccgaataggtagctgataat

SEQ ID NO: 5077 - DNA, 28 bp, Vibrio parahaemolyticus
  Vibrio parahaemolyticus CFSAN025062
gtgaactgccgcataggtagagagaatc

SEQ ID NO: 5078 - DNA, 28 bp, Vibrio parahaemolyticus
  Vibrio parahaemolyticus CFSAN025062
tcattactactaaaaagtagctgataac

SEQ ID NO: 5079 - DNA, 28 bp, Vibrio parahaemolyticus
  Vibrio parahaemolyticus CFSAN025062
gaatactgccgaacaggtaggaggctca

SEQ ID NO: 5080 - DNA, 32 bp, Vibrio parahaemolyticus; identical to SEQ ID NO: 2034
  Vibrio parahaemolyticus CFSAN025062

SEQ ID NO: 5081 - DNA, 32 bp, Vibrio parahaemolyticus; identical to SEQ ID NO: 2035
  Vibrio parahaemolyticus CFSAN025062

SEQ ID NO: 5082 - DNA, 31 bp, Vibrio parahaemolyticus; identical to SEQ ID NO: 1947
  Vibrio parahaemolyticus CFSAN025062

SEQ ID NO: 5083 - DNA, 31 bp, Vibrio parahaemolyticus; identical to SEQ ID NO: 1877
  Vibrio parahaemolyticus CFSAN025062

SEQ ID NO: 5084 - DNA, 31 bp, Vibrio parahaemolyticus; identical to SEQ ID NO: 2038
  Vibrio parahaemolyticus CFSAN025062

SEQ ID NO: 5085 - DNA, 28 bp, Vibrio parahaemolyticus
  Vibrio parahaemolyticus CFSAN025066
gtgaactgccgaataggtagctgataat

SEQ ID NO: 5086 - DNA, 28 bp, Vibrio parahaemolyticus
  Vibrio parahaemolyticus CFSAN025066
gtgaactgccgcataggtagagagaatc

SEQ ID NO: 5087 - DNA, 28 bp, Vibrio parahaemolyticus
  Vibrio parahaemolyticus CFSAN025066
tcattactactaaaaagtagctgataac

SEQ ID NO: 5088 - DNA, 28 bp, Vibrio parahaemolyticus
  Vibrio parahaemolyticus CFSAN025066
gaatactgccgaacaggtaggaggctca

SEQ ID NO: 5089 - DNA, 32 bp, Vibrio parahaemolyticus; identical to SEQ ID NO: 2034
  Vibrio parahaemolyticus CFSAN025066

SEQ ID NO: 5090 - DNA, 32 bp, Vibrio parahaemolyticus; identical to SEQ ID NO: 2035
  Vibrio parahaemolyticus CFSAN025066

SEQ ID NO: 5091 - DNA, 31 bp, Vibrio parahaemolyticus; identical to SEQ ID NO: 1947
  Vibrio parahaemolyticus CFSAN025066

SEQ ID NO: 5092 - DNA, 31 bp, Vibrio parahaemolyticus; identical to SEQ ID NO: 1877
  Vibrio parahaemolyticus CFSAN025066

SEQ ID NO: 5093 - DNA, 31 bp, Vibrio parahaemolyticus; identical to SEQ ID NO: 2038
  Vibrio parahaemolyticus CFSAN025066

SEQ ID NO: 5094 - DNA, 28 bp, Vibrio parahaemolyticus
  Vibrio parahaemolyticus CFSAN029654
gtgaactgccgaataggtagctgataat

SEQ ID NO: 5095 - DNA, 28 bp, Vibrio parahaemolyticus
  Vibrio parahaemolyticus CFSAN029654
gtgaactgccgcataggtagagagaatc

SEQ ID NO: 5096 - DNA, 28 bp, Vibrio parahaemolyticus
  Vibrio parahaemolyticus CFSAN029654
tcattactactaaaaagtagctgataac

SEQ ID NO: 5097 - DNA, 28 bp, Vibrio parahaemolyticus
  Vibrio parahaemolyticus CFSAN029654
gaatactgccgaacaggtaggaggctca

SEQ ID NO: 5098 - DNA, 32 bp, Vibrio parahaemolyticus; identical to SEQ ID NO: 2034
  Vibrio parahaemolyticus CFSAN029654

SEQ ID NO: 5099 - DNA, 32 bp, Vibrio parahaemolyticus; identical to SEQ ID NO: 2035
  Vibrio parahaemolyticus CFSAN029654

SEQ ID NO: 5100 - DNA, 31 bp, Vibrio parahaemolyticus; identical to SEQ ID NO: 1947
  Vibrio parahaemolyticus CFSAN029654

SEQ ID NO: 5101 - DNA, 31 bp, Vibrio parahaemolyticus; identical to SEQ ID NO: 1877
  Vibrio parahaemolyticus CFSAN029654

SEQ ID NO: 5102 - DNA, 31 bp, Vibrio parahaemolyticus; identical to SEQ ID NO: 2038
  Vibrio parahaemolyticus CFSAN029654

SEQ ID NO: 5103 - DNA, 28 bp, Vibrio parahaemolyticus
  Vibrio parahaemolyticus CFSAN025060
gtgaactgccgaataggtagctgataat

SEQ ID NO: 5104 - DNA, 28 bp, Vibrio parahaemolyticus
  Vibrio parahaemolyticus CFSAN025060
gtgaactgccgcataggtagagagaatc

SEQ ID NO: 5105 - DNA, 28 bp, Vibrio parahaemolyticus
  Vibrio parahaemolyticus CFSAN025060
tcattactactaaaaagtagctgataac

SEQ ID NO: 5106 - DNA, 28 bp, Vibrio parahaemolyticus
  Vibrio parahaemolyticus CFSAN025060
gaatactgccgaacaggtaggaggctca

SEQ ID NO: 5107 - DNA, 32 bp, Vibrio parahaemolyticus; identical to SEQ ID NO: 2034
  Vibrio parahaemolyticus CFSAN025060

SEQ ID NO: 5108 - DNA, 32 bp, Vibrio parahaemolyticus; identical to SEQ ID NO: 2035
  Vibrio parahaemolyticus CFSAN025060

SEQ ID NO: 5109 - DNA, 31 bp, Vibrio parahaemolyticus; identical to SEQ ID NO: 1947
  Vibrio parahaemolyticus CFSAN025060

SEQ ID NO: 5110 - DNA, 31 bp, Vibrio parahaemolyticus; identical to SEQ ID NO: 1877
  Vibrio parahaemolyticus CFSAN025060

SEQ ID NO: 5111 - DNA, 31 bp, Vibrio parahaemolyticus; identical to SEQ ID NO: 2038
  Vibrio parahaemolyticus CFSAN025060

SEQ ID NO: 5112 - DNA, 28 bp, Vibrio parahaemolyticus
  Vibrio parahaemolyticus CFSAN025052
gtgaactgccgaataggtagctgataat

SEQ ID NO: 5113 - DNA, 28 bp, Vibrio parahaemolyticus
  Vibrio parahaemolyticus CFSAN025052
gtgaactgccgcataggtagagagaatc

SEQ ID NO: 5114 - DNA, 28 bp, Vibrio parahaemolyticus
  Vibrio parahaemolyticus CFSAN025052
tcattactactaaaaagtagctgataac

SEQ ID NO: 5115 - DNA, 28 bp, Vibrio parahaemolyticus
  Vibrio parahaemolyticus CFSAN025052
gaatactgccgaacaggtaggaggctca

SEQ ID NO: 5116 - DNA, 32 bp, Vibrio parahaemolyticus; identical to SEQ ID NO: 2034
  Vibrio parahaemolyticus CFSAN025052

SEQ ID NO: 5117 - DNA, 32 bp, Vibrio parahaemolyticus; identical to SEQ ID NO: 2035
  Vibrio parahaemolyticus CFSAN025052

SEQ ID NO: 5118 - DNA, 31 bp, Vibrio parahaemolyticus; identical to SEQ ID NO: 1947
  Vibrio parahaemolyticus CFSAN025052

SEQ ID NO: 5119 - DNA, 31 bp, Vibrio parahaemolyticus; identical to SEQ ID NO: 1877
  Vibrio parahaemolyticus CFSAN025052

SEQ ID NO: 5120 - DNA, 31 bp, Vibrio parahaemolyticus; identical to SEQ ID NO: 2038
  Vibrio parahaemolyticus CFSAN025052

SEQ ID NO: 5121 - DNA, 28 bp, Vibrio parahaemolyticus
  Vibrio parahaemolyticus CFSAN025057
gtgaactgccgaataggtagctgataat

SEQ ID NO: 5122 - DNA, 28 bp, Vibrio parahaemolyticus
  Vibrio parahaemolyticus CFSAN025057
gtgaactgccgcataggtagagagaatc

SEQ ID NO: 5123 - DNA, 28 bp, Vibrio parahaemolyticus
  Vibrio parahaemolyticus CFSAN025057
tcattactactaaaaagtagctgataac

SEQ ID NO: 5124 - DNA, 28 bp, Vibrio parahaemolyticus
  Vibrio parahaemolyticus CFSAN025057
gaatactgccgaacaggtaggaggctca

SEQ ID NO: 5125 - DNA, 32 bp, Vibrio parahaemolyticus; identical to SEQ ID NO: 2034
  Vibrio parahaemolyticus CFSAN025057

SEQ ID NO: 5126 - DNA, 32 bp, Vibrio parahaemolyticus; identical to SEQ ID NO: 2035
  Vibrio parahaemolyticus CFSAN025057

SEQ ID NO: 5127 - DNA, 31 bp, Vibrio parahaemolyticus; identical to SEQ ID NO: 1947
  Vibrio parahaemolyticus CFSAN025057

SEQ ID NO: 5128 - DNA, 31 bp, Vibrio parahaemolyticus; identical to SEQ ID NO: 1877
  Vibrio parahaemolyticus CFSAN025057

SEQ ID NO: 5129 - DNA, 31 bp, Vibrio parahaemolyticus; identical to SEQ ID NO: 2038
  Vibrio parahaemolyticus CFSAN025057

SEQ ID NO: 5130 - DNA, 28 bp, Vibrio parahaemolyticus
  Vibrio parahaemolyticus CFSAN018754
gtgaactgccgaataggtagctgataat

SEQ ID NO: 5131 - DNA, 28 bp, Vibrio parahaemolyticus
  Vibrio parahaemolyticus CFSAN018754
gtgaactgccgcataggtagagagaatc

SEQ ID NO: 5132 - DNA, 28 bp, Vibrio parahaemolyticus
  Vibrio parahaemolyticus CFSAN018754
tcattactactaaaaagtagctgataac

SEQ ID NO: 5133 - DNA, 28 bp, Vibrio parahaemolyticus
  Vibrio parahaemolyticus CFSAN018754
gaatactgccgaacaggtaggaggctca

SEQ ID NO: 5134 - DNA, 32 bp, Vibrio parahaemolyticus; identical to SEQ ID NO: 1946
  Vibrio parahaemolyticus CFSAN018754

SEQ ID NO: 5135 - DNA, 31 bp, Vibrio parahaemolyticus; identical to SEQ ID NO: 1947
  Vibrio parahaemolyticus CFSAN018754

SEQ ID NO: 5136 - DNA, 31 bp, Vibrio parahaemolyticus; identical to SEQ ID NO: 1877
  Vibrio parahaemolyticus CFSAN018754

SEQ ID NO: 5137 - DNA, 31 bp, Vibrio parahaemolyticus; identical to SEQ ID NO: 1878
  Vibrio parahaemolyticus CFSAN018754

SEQ ID NO: 5138 - DNA, 28 bp, Vibrio parahaemolyticus
  Vibrio parahaemolyticus GCSL_R12
gtgaactgccgaataggtagctgataat

SEQ ID NO: 5139 - DNA, 28 bp, Vibrio parahaemolyticus
  Vibrio parahaemolyticus GCSL_R12
atgaactgccgaataggtagagaggagc

SEQ ID NO: 5140 - DNA, 28 bp, Vibrio parahaemolyticus
  Vibrio parahaemolyticus GCSL_R12
tcattactacttaaaagtagctgataac

SEQ ID NO: 5141 - DNA, 28 bp, Vibrio parahaemolyticus
  Vibrio parahaemolyticus GCSL_R12
gaatactgccgaacaggtaggaggctca

SEQ ID NO: 5142 - DNA, 31 bp, Vibrio parahaemolyticus; identical to SEQ ID NO: 1897
  Vibrio parahaemolyticus GCSL_R12

SEQ ID NO: 5143 - DNA, 31 bp, Vibrio parahaemolyticus; identical to SEQ ID NO: 1877
  Vibrio parahaemolyticus GCSL_R12

SEQ ID NO: 5144 - DNA, 31 bp, Vibrio parahaemolyticus; identical to SEQ ID NO: 1878
  Vibrio parahaemolyticus GCSL_R12

SEQ ID NO: 5145 - DNA, 28 bp, Vibrio parahaemolyticus
  Vibrio parahaemolyticus GCSL_R30
gtgaactgccgaataggtagctgataat

SEQ ID NO: 5146 - DNA, 28 bp, Vibrio parahaemolyticus
  Vibrio parahaemolyticus GCSL_R30
atgaactgccgaataggtagagaggagc

SEQ ID NO: 5147 - DNA, 28 bp, Vibrio parahaemolyticus
  Vibrio parahaemolyticus GCSL_R30
tcattactacttaaaagtagctgataac

SEQ ID NO: 5148 - DNA, 28 bp, Vibrio parahaemolyticus
  Vibrio parahaemolyticus GCSL_R30
gaatactgccgaacaggtaggaggctca

SEQ ID NO: 5149 - DNA, 31 bp, Vibrio parahaemolyticus; identical to SEQ ID NO: 1897
  Vibrio parahaemolyticus GCSL_R30

SEQ ID NO: 5150 - DNA, 31 bp, Vibrio parahaemolyticus; identical to SEQ ID NO: 1877
  Vibrio parahaemolyticus GCSL_R30

SEQ ID NO: 5151 - DNA, 31 bp, Vibrio parahaemolyticus; identical to SEQ ID NO: 1970
  Vibrio parahaemolyticus GCSL_R30

SEQ ID NO: 5152 - DNA, 28 bp, Vibrio parahaemolyticus
  Vibrio parahaemolyticus GCSL_R32
gtgaactgccgaataggtagctgataat

SEQ ID NO: 5153 - DNA, 28 bp, Vibrio parahaemolyticus
  Vibrio parahaemolyticus GCSL_R32
atgaactgccgaataggtagagaggagc

SEQ ID NO: 5154 - DNA, 28 bp, Vibrio parahaemolyticus
  Vibrio parahaemolyticus GCSL_R32
tcattactacttaaaagtagctgataac

SEQ ID NO: 5155 - DNA, 28 bp, Vibrio parahaemolyticus
  Vibrio parahaemolyticus GCSL_R32
gaatactgccgaacaggtaggaggctca

SEQ ID NO: 5156 - DNA, 31 bp, Vibrio parahaemolyticus; identical to SEQ ID NO: 1897
  Vibrio parahaemolyticus GCSL_R32

SEQ ID NO: 5157 - DNA, 31 bp, Vibrio parahaemolyticus; identical to SEQ ID NO: 1877
  Vibrio parahaemolyticus GCSL_R32

SEQ ID NO: 5158 - DNA, 31 bp, Vibrio parahaemolyticus; identical to SEQ ID NO: 1970
  Vibrio parahaemolyticus GCSL_R32

SEQ ID NO: 5159 - DNA, 28 bp, Vibrio parahaemolyticus
  Vibrio parahaemolyticus GCSL_R57
gttcaccgccgcataggcagctgataat

SEQ ID NO: 5160 - DNA, 28 bp, Vibrio parahaemolyticus
  Vibrio parahaemolyticus GCSL_R57
gttcaccgccgcataggcagatttaact

SEQ ID NO: 5161 - DNA, 28 bp, Vibrio parahaemolyticus
  Vibrio parahaemolyticus GCSL_R57
cactactactgtaaaagtagctgataaa

SEQ ID NO: 5162 - DNA, 28 bp, Vibrio parahaemolyticus
  Vibrio parahaemolyticus GCSL_R57
aattactgctgaataagtagatatttat

SEQ ID NO: 5163 - DNA, 32 bp, Vibrio parahaemolyticus; identical to SEQ ID NO: 2381
  Vibrio parahaemolyticus GCSL_R57

SEQ ID NO: 5164 - DNA, 32 bp, Vibrio parahaemolyticus; identical to SEQ ID NO: 2382
  Vibrio parahaemolyticus GCSL_R57

SEQ ID NO: 5165 - DNA, 32 bp, Vibrio parahaemolyticus; identical to SEQ ID NO: 2384
  Vibrio parahaemolyticus GCSL_R57

SEQ ID NO: 5166 - DNA, 31 bp, Vibrio parahaemolyticus; identical to SEQ ID NO: 2385
  Vibrio parahaemolyticus GCSL_R57

SEQ ID NO: 5167 - DNA, 31 bp, Vibrio parahaemolyticus; identical to SEQ ID NO: 2386
  Vibrio parahaemolyticus GCSL_R57

SEQ ID NO: 5168 - DNA, 28 bp, Vibrio parahaemolyticus
  Vibrio parahaemolyticus GCSL_R77
gtgaactgccgaataggtagctgataat

SEQ ID NO: 5169 - DNA, 28 bp, Vibrio parahaemolyticus
  Vibrio parahaemolyticus GCSL_R77
atgaactgccgaataggtagagaggagc

SEQ ID NO: 5170 - DNA, 28 bp, Vibrio parahaemolyticus
  Vibrio parahaemolyticus GCSL_R77
tcattactacttaaaagtagctgataac

SEQ ID NO: 5171 - DNA, 28 bp, Vibrio parahaemolyticus
  Vibrio parahaemolyticus GCSL_R77
gaatactgccgaacaggtaggaggctca

SEQ ID NO: 5172 - DNA, 31 bp, Vibrio parahaemolyticus; identical to SEQ ID NO: 1897
  Vibrio parahaemolyticus GCSL_R77

SEQ ID NO: 5173 - DNA, 31 bp, Vibrio parahaemolyticus; identical to SEQ ID NO: 1877
  Vibrio parahaemolyticus GCSL_R77

SEQ ID NO: 5174 - DNA, 31 bp, Vibrio parahaemolyticus; identical to SEQ ID NO: 1878
  Vibrio parahaemolyticus GCSL_R77

SEQ ID NO: 5175 - DNA, 28 bp, Vibrio parahaemolyticus
  Vibrio parahaemolyticus GCSL_R138
gtgaactgccgaataggtagctgataat

SEQ ID NO: 5176 - DNA, 28 bp, Vibrio parahaemolyticus
  Vibrio parahaemolyticus GCSL_R138
atgaactgccgaataggtagagaggagc

SEQ ID NO: 5177 - DNA, 28 bp, Vibrio parahaemolyticus
  Vibrio parahaemolyticus GCSL_R138
tcattactacttaaaagtagctgataac

SEQ ID NO: 5178 - DNA, 28 bp, Vibrio parahaemolyticus
  Vibrio parahaemolyticus GCSL_R138
gaatactgccgaacaggtaggaggctca

SEQ ID NO: 5179 - DNA, 31 bp, Vibrio parahaemolyticus; identical to SEQ ID NO: 1897
  Vibrio parahaemolyticus GCSL_R138

SEQ ID NO: 5180 - DNA, 31 bp, Vibrio parahaemolyticus; identical to SEQ ID NO: 1877
  Vibrio parahaemolyticus GCSL_R138

SEQ ID NO: 5181 - DNA, 31 bp, Vibrio parahaemolyticus; identical to SEQ ID NO: 1970
  Vibrio parahaemolyticus GCSL_R138

SEQ ID NO: 5182 - DNA, 28 bp, Vibrio parahaemolyticus
  Vibrio parahaemolyticus GCSL_R149
gtgaactgccgaataggtagctgataat

SEQ ID NO: 5183 - DNA, 28 bp, Vibrio parahaemolyticus
  Vibrio parahaemolyticus GCSL_R149
atgaactgccgaataggtagagaggagc

SEQ ID NO: 5184 - DNA, 28 bp, Vibrio parahaemolyticus
  Vibrio parahaemolyticus GCSL_R149
tcattactacttaaaagtagctgataac

SEQ ID NO: 5185 - DNA, 28 bp, Vibrio parahaemolyticus
  Vibrio parahaemolyticus GCSL_R149
gaatactgccgaacaggtaggaggctca

SEQ ID NO: 5186 - DNA, 31 bp, Vibrio parahaemolyticus; identical to SEQ ID NO: 1897
  Vibrio parahaemolyticus GCSL_R149

SEQ ID NO: 5187 - DNA, 31 bp, Vibrio parahaemolyticus; identical to SEQ ID NO: 1877
  Vibrio parahaemolyticus GCSL_R149

SEQ ID NO: 5188 - DNA, 31 bp, Vibrio parahaemolyticus; identical to SEQ ID NO: 1970
  Vibrio parahaemolyticus GCSL_R149

SEQ ID NO: 5189 - DNA, 28 bp, Vibrio parahaemolyticus
  Vibrio parahaemolyticus CDC_K5324G
gtgaactgccgaataggtagctgataat

SEQ ID NO: 5190 - DNA, 28 bp, Vibrio parahaemolyticus
  Vibrio parahaemolyticus CDC_K5324G
gtgaactgccgcataggtagagaggatc

SEQ ID NO: 5191 - DNA, 28 bp, Vibrio parahaemolyticus
  Vibrio parahaemolyticus CDC_K5324G
tcatcactactgaaaagtagctgataac

SEQ ID NO: 5192 - DNA, 28 bp, Vibrio parahaemolyticus
  Vibrio parahaemolyticus CDC_K5324G
gaatactgccgaacaggtaggaggctca

SEQ ID NO: 5193 - DNA, 31 bp, Vibrio parahaemolyticus; identical to SEQ ID NO: 1876
  Vibrio parahaemolyticus CDC_K5324G

SEQ ID NO: 5194 - DNA, 31 bp, Vibrio parahaemolyticus; identical to SEQ ID NO: 1877
  Vibrio parahaemolyticus CDC_K5324G

SEQ ID NO: 5195 - DNA, 31 bp, Vibrio parahaemolyticus; identical to SEQ ID NO: 1970
  Vibrio parahaemolyticus CDC_K5324G

SEQ ID NO: 5196 - DNA, 28 bp, Vibrio parahaemolyticus
  Vibrio parahaemolyticus CDC_K5437
gtgaactgccgaataggtagctgataat

SEQ ID NO: 5197 - DNA, 28 bp, Vibrio parahaemolyticus
  Vibrio parahaemolyticus CDC_K5437
gtgaactgccgcataggtagagaggatc

SEQ ID NO: 5198 - DNA, 28 bp, Vibrio parahaemolyticus
  Vibrio parahaemolyticus CDC_K5437
tcatcactactgaaaagtagctgataac

SEQ ID NO: 5199 - DNA, 28 bp, Vibrio parahaemolyticus
  Vibrio parahaemolyticus CDC_K5437
gaatactgccgaacaggtaggaggctca

SEQ ID NO: 5200 - DNA, 31 bp, Vibrio parahaemolyticus; identical to SEQ ID NO: 1876
  Vibrio parahaemolyticus CDC_K5437

SEQ ID NO: 5201 - DNA, 31 bp, Vibrio parahaemolyticus; identical to SEQ ID NO: 1877
  Vibrio parahaemolyticus CDC_K5437

SEQ ID NO: 5202 - DNA, 31 bp, Vibrio parahaemolyticus; identical to SEQ ID NO: 1878
  Vibrio parahaemolyticus CDC_K5437

SEQ ID NO: 5203 - DNA, 28 bp, Vibrio parahaemolyticus
  Vibrio parahaemolyticus CDC_K5280
gtgaactgccgaataggtagctgataat

SEQ ID NO: 5204 - DNA, 28 bp, Vibrio parahaemolyticus
  Vibrio parahaemolyticus CDC_K5280
gtgaactgccgcataggtagagaggatc

SEQ ID NO: 5205 - DNA, 28 bp, Vibrio parahaemolyticus
  Vibrio parahaemolyticus CDC_K5280
tcatcactactgaaaagtagctgataac

SEQ ID NO: 5206 - DNA, 28 bp, Vibrio parahaemolyticus
  Vibrio parahaemolyticus CDC_K5280
gaatactgccgaacaggtaggaggctca

SEQ ID NO: 5207 - DNA, 31 bp, Vibrio parahaemolyticus; identical to SEQ ID NO: 1876
  Vibrio parahaemolyticus CDC_K5280

SEQ ID NO: 5208 - DNA, 31 bp, Vibrio parahaemolyticus; identical to SEQ ID NO: 1877
  Vibrio parahaemolyticus CDC_K5280

SEQ ID NO: 5209 - DNA, 31 bp, Vibrio parahaemolyticus; identical to SEQ ID NO: 1878
  Vibrio parahaemolyticus CDC_K5280

SEQ ID NO: 5210 - DNA, 28 bp, Vibrio parahaemolyticus
  Vibrio parahaemolyticus CDC_K4558W
gtgaactgccgaataggtagctgataat

SEQ ID NO: 5211 - DNA, 28 bp, Vibrio parahaemolyticus
  Vibrio parahaemolyticus CDC_K4558W
gtgaactgccgcataggtagagaggatc

SEQ ID NO: 5212 - DNA, 28 bp, Vibrio parahaemolyticus
  Vibrio parahaemolyticus CDC_K4558W
tcatcactactgaaaagtagctgataac

SEQ ID NO: 5213 - DNA, 28 bp, Vibrio parahaemolyticus
  Vibrio parahaemolyticus CDC_K4558W
gaatactgccgaacaggtaggaggctca

SEQ ID NO: 5214 - DNA, 31 bp, Vibrio parahaemolyticus; identical to SEQ ID NO: 1876
  Vibrio parahaemolyticus CDC_K4558W

SEQ ID NO: 5215 - DNA, 31 bp, Vibrio parahaemolyticus; identical to SEQ ID NO: 1877
  Vibrio parahaemolyticus CDC_K4558W

SEQ ID NO: 5216 - DNA, 31 bp, Vibrio parahaemolyticus; identical to SEQ ID NO: 1970
  Vibrio parahaemolyticus CDC_K4558W

SEQ ID NO: 5217 - DNA, 28 bp, Vibrio parahaemolyticus
  Vibrio parahaemolyticus CDC_K5009W
gtgaactgccgaataggtagctgataat

SEQ ID NO: 5218 - DNA, 28 bp, Vibrio parahaemolyticus
  Vibrio parahaemolyticus CDC_K5009W
gtgaactgccgcataggtagagaggatc

SEQ ID NO: 5219 - DNA, 28 bp, Vibrio parahaemolyticus
  Vibrio parahaemolyticus CDC_K5009W
tcattactacttaaaagtagctgataac

SEQ ID NO: 5220 - DNA, 28 bp, Vibrio parahaemolyticus
  Vibrio parahaemolyticus CDC_K5009W
gaatactgccgaacaggtaggaggctca

SEQ ID NO: 5221 - DNA, 31 bp, Vibrio parahaemolyticus; identical to SEQ ID NO: 2018
  Vibrio parahaemolyticus CDC_K5009W

SEQ ID NO: 5222 - DNA, 31 bp, Vibrio parahaemolyticus; identical to SEQ ID NO: 1947
  Vibrio parahaemolyticus CDC_K5009W

SEQ ID NO: 5223 - DNA, 31 bp, Vibrio parahaemolyticus; identical to SEQ ID NO: 1877
  Vibrio parahaemolyticus CDC_K5009W

SEQ ID NO: 5224 - DNA, 31 bp, Vibrio parahaemolyticus; identical to SEQ ID NO: 1878
  Vibrio parahaemolyticus CDC_K5009W

SEQ ID NO: 5225 - DNA, 28 bp, Vibrio parahaemolyticus
  Vibrio parahaemolyticus CDC_K5067
gtgaactgccgaataggtagctgataat

SEQ ID NO: 5226 - DNA, 28 bp, Vibrio parahaemolyticus
  Vibrio parahaemolyticus CDC_K5067
atgaactgccgaataggtagagaggagc

SEQ ID NO: 5227 - DNA, 28 bp, Vibrio parahaemolyticus
  Vibrio parahaemolyticus CDC_K5067
tcattactacttaaaagtagctgataac

SEQ ID NO: 5228 - DNA, 28 bp, Vibrio parahaemolyticus
  Vibrio parahaemolyticus CDC_K5067
gaatactgccgaacaggtaggaggctca

SEQ ID NO: 5229 - DNA, 31 bp, Vibrio parahaemolyticus; identical to SEQ ID NO: 1897
  Vibrio parahaemolyticus CDC_K5067

SEQ ID NO: 5230 - DNA, 31 bp, Vibrio parahaemolyticus; identical to SEQ ID NO: 1877
  Vibrio parahaemolyticus CDC_K5067

SEQ ID NO: 5231 - DNA, 31 bp, Vibrio parahaemolyticus; identical to SEQ ID NO: 1970
  Vibrio parahaemolyticus CDC_K5067

SEQ ID NO: 5232 - DNA, 28 bp, Vibrio parahaemolyticus
  Vibrio parahaemolyticus CDC_K5346
gtgaactgccgaataggtagctgataat

SEQ ID NO: 5233 - DNA, 28 bp, Vibrio parahaemolyticus
  Vibrio parahaemolyticus CDC_K5346
gtgaactgccgcataggtagagaggatc

SEQ ID NO: 5234 - DNA, 28 bp, Vibrio parahaemolyticus
  Vibrio parahaemolyticus CDC_K5346
tcatcactactgaaaagtagctgataac

SEQ ID NO: 5235 - DNA, 28 bp, Vibrio parahaemolyticus
  Vibrio parahaemolyticus CDC_K5346
gaatactgccgaacaggtaggaggctca

SEQ ID NO: 5236 - DNA, 31 bp, Vibrio parahaemolyticus; identical to SEQ ID NO: 1876
  Vibrio parahaemolyticus CDC_K5346

SEQ ID NO: 5237 - DNA, 31 bp, Vibrio parahaemolyticus; identical to SEQ ID NO: 1877
  Vibrio parahaemolyticus CDC_K5346

SEQ ID NO: 5238 - DNA, 31 bp, Vibrio parahaemolyticus; identical to SEQ ID NO: 1878
  Vibrio parahaemolyticus CDC_K5346

SEQ ID NO: 5239 - DNA, 28 bp, Vibrio parahaemolyticus
  Vibrio parahaemolyticus CDC_K5345W
gtgaactgccgaataggtagctgataat

SEQ ID NO: 5240 - DNA, 28 bp, Vibrio parahaemolyticus
  Vibrio parahaemolyticus CDC_K5345W
gtgaactgccgcataggtagagaggatc

SEQ ID NO: 5241 - DNA, 28 bp, Vibrio parahaemolyticus
  Vibrio parahaemolyticus CDC_K5345W
tcatcactactgaaaagtagctgataac

SEQ ID NO: 5242 - DNA, 28 bp, Vibrio parahaemolyticus
  Vibrio parahaemolyticus CDC_K5345W
gaatactgccgaacaggtaggaggctca

SEQ ID NO: 5243 - DNA, 31 bp, Vibrio parahaemolyticus; identical to SEQ ID NO: 1876
  Vibrio parahaemolyticus CDC_K5345W

SEQ ID NO: 5244 - DNA, 31 bp, Vibrio parahaemolyticus; identical to SEQ ID NO: 1877
  Vibrio parahaemolyticus CDC_K5345W

SEQ ID NO: 5245 - DNA, 31 bp, Vibrio parahaemolyticus; identical to SEQ ID NO: 1878
  Vibrio parahaemolyticus CDC_K5345W

SEQ ID NO: 5246 - DNA, 28 bp, Vibrio parahaemolyticus
  Vibrio parahaemolyticus CDC_K5579
gtgaactgccgaataggtagctgataat

SEQ ID NO: 5247 - DNA, 28 bp, Vibrio parahaemolyticus
  Vibrio parahaemolyticus CDC_K5579
gtgaactgccgcataggtagagaggatc

SEQ ID NO: 5248 - DNA, 28 bp, Vibrio parahaemolyticus
  Vibrio parahaemolyticus CDC_K5579
tcatcactactgaaaagtagctgataac

SEQ ID NO: 5249 - DNA, 28 bp, Vibrio parahaemolyticus
  Vibrio parahaemolyticus CDC_K5579
gaatactgccgaacaggtaggaggctca

SEQ ID NO: 5250 - DNA, 31 bp, Vibrio parahaemolyticus; identical to SEQ ID NO: 1876
  Vibrio parahaemolyticus CDC_K5579

SEQ ID NO: 5251 - DNA, 31 bp, Vibrio parahaemolyticus; identical to SEQ ID NO: 1877
  Vibrio parahaemolyticus CDC_K5579

SEQ ID NO: 5252 - DNA, 31 bp, Vibrio parahaemolyticus; identical to SEQ ID NO: 1970
  Vibrio parahaemolyticus CDC_K5579

SEQ ID NO: 5253 - DNA, 28 bp, Vibrio parahaemolyticus
  Vibrio parahaemolyticus CDC_K5629
gtgaactgccgaataggtagctgataat

SEQ ID NO: 5254 - DNA, 28 bp, Vibrio parahaemolyticus
  Vibrio parahaemolyticus CDC_K5629
gtgaactgccgcataggtagagaggatc

SEQ ID NO: 5255 - DNA, 28 bp, Vibrio parahaemolyticus
  Vibrio parahaemolyticus CDC_K5629
tcatcactactgaaaagtagctgataac

SEQ ID NO: 5256 - DNA, 28 bp, Vibrio parahaemolyticus
  Vibrio parahaemolyticus CDC_K5629
gaatactgccgaacaggtaggaggctca

SEQ ID NO: 5257 - DNA, 31 bp, Vibrio parahaemolyticus; identical to SEQ ID NO: 1876
  Vibrio parahaemolyticus CDC_K5629

SEQ ID NO: 5258 - DNA, 31 bp, Vibrio parahaemolyticus; identical to SEQ ID NO: 1877
  Vibrio parahaemolyticus CDC_K5629

SEQ ID NO: 5259 - DNA, 31 bp, Vibrio parahaemolyticus; identical to SEQ ID NO: 1878
  Vibrio parahaemolyticus CDC_K5629

SEQ ID NO: 5260 - DNA, 28 bp, Vibrio parahaemolyticus
  Vibrio parahaemolyticus CICESE-170
gtgaactgccgaataggtagctgataat

SEQ ID NO: 5261 - DNA, 28 bp, Vibrio parahaemolyticus
  Vibrio parahaemolyticus CICESE-170
gtgaactgccgcataggtagagagaatc

SEQ ID NO: 5262 - DNA, 28 bp, Vibrio parahaemolyticus
  Vibrio parahaemolyticus CICESE-170
tcattactactaaaaagtagctgataac

SEQ ID NO: 5263 - DNA, 28 bp, Vibrio parahaemolyticus
  Vibrio parahaemolyticus CICESE-170
gaatactgccgaacaggtaggaggctca

SEQ ID NO: 5264 - DNA, 32 bp, Vibrio parahaemolyticus; identical to SEQ ID NO: 1946
  Vibrio parahaemolyticus CICESE-170

SEQ ID NO: 5265 - DNA, 31 bp, Vibrio parahaemolyticus; identical to SEQ ID NO: 1947
  Vibrio parahaemolyticus CICESE-170

SEQ ID NO: 5266 - DNA, 31 bp, Vibrio parahaemolyticus; identical to SEQ ID NO: 1877
  Vibrio parahaemolyticus CICESE-170

SEQ ID NO: 5267 - DNA, 31 bp, Vibrio parahaemolyticus; identical to SEQ ID NO: 1878
  Vibrio parahaemolyticus CICESE-170

SEQ ID NO: 5268 - DNA, 28 bp, Vibrio parahaemolyticus
  Vibrio parahaemolyticus PMA12.14
gtgaactgccgaataggtagctgataat

SEQ ID NO: 5269 - DNA, 28 bp, Vibrio parahaemolyticus
  Vibrio parahaemolyticus PMA12.14
gtgaactgccgcataggtagagaggatc

SEQ ID NO: 5270 - DNA, 28 bp, Vibrio parahaemolyticus
  Vibrio parahaemolyticus PMA12.14
tcatcactacttaaaagtagctgataac

SEQ ID NO: 5271 - DNA, 28 bp, Vibrio parahaemolyticus
  Vibrio parahaemolyticus PMA12.14
gaatactgccgaacaggtaggaggctca

SEQ ID NO: 5272 - DNA, 31 bp, Vibrio parahaemolyticus; identical to SEQ ID NO: 2018
  Vibrio parahaemolyticus PMA12.14

SEQ ID NO: 5273 - DNA, 31 bp, Vibrio parahaemolyticus; identical to SEQ ID NO: 1947
  Vibrio parahaemolyticus PMA12.14

SEQ ID NO: 5274 - DNA, 31 bp, Vibrio parahaemolyticus; identical to SEQ ID NO: 1877
  Vibrio parahaemolyticus PMA12.14

SEQ ID NO: 5275 - DNA, 31 bp, Vibrio parahaemolyticus; identical to SEQ ID NO: 2146
  Vibrio parahaemolyticus PMA12.14

SEQ ID NO: 5276 - DNA, 28 bp, Vibrio parahaemolyticus
  Vibrio parahaemolyticus VN-0293
gtgaactgccgaataggtagctgataat

SEQ ID NO: 5277 - DNA, 28 bp, Vibrio parahaemolyticus
  Vibrio parahaemolyticus VN-0293
gtgaactgccgcataggtagagaggatc

SEQ ID NO: 5278 - DNA, 28 bp, Vibrio parahaemolyticus
  Vibrio parahaemolyticus VN-0293
tcattactactgaaaagtagctgataac

SEQ ID NO: 5279 - DNA, 28 bp, Vibrio parahaemolyticus
  Vibrio parahaemolyticus VN-0293
gaatactgccgaacaggtaggaggctca

SEQ ID NO: 5280 - DNA, 32 bp, Vibrio parahaemolyticus; identical to SEQ ID NO: 4402
  Vibrio parahaemolyticus VN-0293

SEQ ID NO: 5281 - DNA, 31 bp, Vibrio parahaemolyticus; identical to SEQ ID NO: 4403
  Vibrio parahaemolyticus VN-0293

SEQ ID NO: 5282 - DNA, 31 bp, Vibrio parahaemolyticus; identical to SEQ ID NO: 1970
  Vibrio parahaemolyticus VN-0293

SEQ ID NO: 5283 - DNA, 28 bp, Vibrio parahaemolyticus
  Vibrio parahaemolyticus xtf19
gtgaactgccgaataggtagctgataat

SEQ ID NO: 5284 - DNA, 28 bp, Vibrio parahaemolyticus
  Vibrio parahaemolyticus xtf19
gtgaactgccgcataggtagagaggagc

SEQ ID NO: 5285 - DNA, 28 bp, Vibrio parahaemolyticus
  Vibrio parahaemolyticus xtf19
tcattactactgaaaagtagctgatcac

SEQ ID NO: 5286 - DNA, 28 bp, Vibrio parahaemolyticus
  Vibrio parahaemolyticus xtf19
gaatactgccgaacaggtaggaggctca

SEQ ID NO: 5287 - DNA, 32 bp, Vibrio parahaemolyticus; identical to SEQ ID NO: 2814
  Vibrio parahaemolyticus xtf19

SEQ ID NO: 5288 - DNA, 31 bp, Vibrio parahaemolyticus; identical to SEQ ID NO: 1877
  Vibrio parahaemolyticus xtf19

SEQ ID NO: 5289 - DNA, 31 bp, Vibrio parahaemolyticus; identical to SEQ ID NO: 1878
  Vibrio parahaemolyticus xtf19

SEQ ID NO: 5290 - DNA, 28 bp, Vibrio parahaemolyticus
  Vibrio parahaemolyticus CFSAN001606
gtgaactgccgaataggtagctgataat

SEQ ID NO: 5291 - DNA, 28 bp, Vibrio parahaemolyticus
  Vibrio parahaemolyticus CFSAN001606
gtgaactgccgcataggtagagaggatc

SEQ ID NO: 5292 - DNA, 28 bp, Vibrio parahaemolyticus
  Vibrio parahaemolyticus CFSAN001606
tcatcactactgaaaagtagctgataac

SEQ ID NO: 5293 - DNA, 28 bp, Vibrio parahaemolyticus
  Vibrio parahaemolyticus CFSAN001606
gaatactgccgaacaggtaggaggctca

SEQ ID NO: 5294 - DNA, 31 bp, Vibrio parahaemolyticus; identical to SEQ ID NO: 1876
  Vibrio parahaemolyticus CFSAN001606

SEQ ID NO: 5295 - DNA, 31 bp, Vibrio parahaemolyticus; identical to SEQ ID NO: 1877
  Vibrio parahaemolyticus CFSAN001606

SEQ ID NO: 5296 - DNA, 31 bp, Vibrio parahaemolyticus; identical to SEQ ID NO: 1878
  Vibrio parahaemolyticus CFSAN001606

SEQ ID NO: 5297 - DNA, 28 bp, Vibrio parahaemolyticus
  Vibrio parahaemolyticus CFSAN001607
gtgaactgccgaataggtagctgataat

SEQ ID NO: 5298 - DNA, 28 bp, Vibrio parahaemolyticus
  Vibrio parahaemolyticus CFSAN001607
gtgaactgccgcataggtagagaggatc

SEQ ID NO: 5299 - DNA, 28 bp, Vibrio parahaemolyticus
  Vibrio parahaemolyticus CFSAN001607
tcatcactactgaaaagtagctgataac

SEQ ID NO: 5300 - DNA, 28 bp, Vibrio parahaemolyticus
  Vibrio parahaemolyticus CFSAN001607
gaatactgccgaacaggtaggaggctca

SEQ ID NO: 5301 - DNA, 31 bp, Vibrio parahaemolyticus; identical to SEQ ID NO: 1876
  Vibrio parahaemolyticus CFSAN001607

SEQ ID NO: 5302 - DNA, 31 bp, Vibrio parahaemolyticus; identical to SEQ ID NO: 1877
  Vibrio parahaemolyticus CFSAN001607

SEQ ID NO: 5303 - DNA, 31 bp, Vibrio parahaemolyticus; identical to SEQ ID NO: 1878
  Vibrio parahaemolyticus CFSAN001607

SEQ ID NO: 5304 - DNA, 28 bp, Vibrio parahaemolyticus
  Vibrio parahaemolyticus CFSAN001599
gtgaactgccgaataggtagctgataat

SEQ ID NO: 5305 - DNA, 28 bp, Vibrio parahaemolyticus
  Vibrio parahaemolyticus CFSAN001599
gtgaactgccgcataggtagagaggatc

SEQ ID NO: 5306 - DNA, 28 bp, Vibrio parahaemolyticus
  Vibrio parahaemolyticus CFSAN001599
tcatcactactgaaaagtagctgataac

SEQ ID NO: 5307 - DNA, 28 bp, Vibrio parahaemolyticus
  Vibrio parahaemolyticus CFSAN001599
gaatactgccgaacaggtaggaggctca

SEQ ID NO: 5308 - DNA, 31 bp, Vibrio parahaemolyticus; identical to SEQ ID NO: 1876
  Vibrio parahaemolyticus CFSAN001599

SEQ ID NO: 5309 - DNA, 31 bp, Vibrio parahaemolyticus; identical to SEQ ID NO: 1877
  Vibrio parahaemolyticus CFSAN001599

SEQ ID NO: 5310 - DNA, 31 bp, Vibrio parahaemolyticus; identical to SEQ ID NO: 1878
  Vibrio parahaemolyticus CFSAN001599

SEQ ID NO: 5311 - DNA, 28 bp, Vibrio parahaemolyticus
  Vibrio parahaemolyticus CFSAN018772
gtgaactgccgaataggtagctgataat

SEQ ID NO: 5312 - DNA, 28 bp, Vibrio parahaemolyticus
  Vibrio parahaemolyticus CFSAN018772
gtgaactgccgcataggtagagaggatc

SEQ ID NO: 5313 - DNA, 28 bp, Vibrio parahaemolyticus
  Vibrio parahaemolyticus CFSAN018772
tcatcactactgaaaagtagctgataac

SEQ ID NO: 5314 - DNA, 28 bp, Vibrio parahaemolyticus
  Vibrio parahaemolyticus CFSAN018772
gaatactgccgaacaggtaggaggctca

SEQ ID NO: 5315 - DNA, 31 bp, Vibrio parahaemolyticus; identical to SEQ ID NO: 1876
  Vibrio parahaemolyticus CFSAN018772

SEQ ID NO: 5316 - DNA, 31 bp, Vibrio parahaemolyticus; identical to SEQ ID NO: 1877
  Vibrio parahaemolyticus CFSAN018772

SEQ ID NO: 5317 - DNA, 31 bp, Vibrio parahaemolyticus; identical to SEQ ID NO: 1878
  Vibrio parahaemolyticus CFSAN018772

SEQ ID NO: 5318 - DNA, 28 bp, Vibrio parahaemolyticus
  Vibrio parahaemolyticus CFSAN018773
gtgaactgccgaataggtagctgataat

SEQ ID NO: 5319 - DNA, 28 bp, Vibrio parahaemolyticus
  Vibrio parahaemolyticus CFSAN018773
gtgaactgccgcataggtagagaggatc

SEQ ID NO: 5320 - DNA, 28 bp, Vibrio parahaemolyticus
  Vibrio parahaemolyticus CFSAN018773
tcatcactactgaaaagtagctgataac

SEQ ID NO: 5321 - DNA, 28 bp, Vibrio parahaemolyticus
  Vibrio parahaemolyticus CFSAN018773
gaatactgccgaacaggtaggaggctca

SEQ ID NO: 5322 - DNA, 31 bp, Vibrio parahaemolyticus; identical to SEQ ID NO: 1876
  Vibrio parahaemolyticus CFSAN018773

SEQ ID NO: 5323 - DNA, 31 bp, Vibrio parahaemolyticus; identical to SEQ ID NO: 1877
  Vibrio parahaemolyticus CFSAN018773

SEQ ID NO: 5324 - DNA, 31 bp, Vibrio parahaemolyticus; identical to SEQ ID NO: 1878
  Vibrio parahaemolyticus CFSAN018773

SEQ ID NO: 5325 - DNA, 28 bp, Vibrio parahaemolyticus
  Vibrio parahaemolyticus CFSAN018771
gtgaactgccgaataggtagctgataat

SEQ ID NO: 5326 - DNA, 28 bp, Vibrio parahaemolyticus
  Vibrio parahaemolyticus CFSAN018771
gtgaactgccgcataggtagagaggatc

SEQ ID NO: 5327 - DNA, 28 bp, Vibrio parahaemolyticus
  Vibrio parahaemolyticus CFSAN018771
tcatcactactgaaaagtagctgataac

SEQ ID NO: 5328 - DNA, 28 bp, Vibrio parahaemolyticus
  Vibrio parahaemolyticus CFSAN018771
gaatactgccgaacaggtaggaggctca

SEQ ID NO: 5329 - DNA, 31 bp, Vibrio parahaemolyticus; identical to SEQ ID NO: 1876
  Vibrio parahaemolyticus CFSAN018771

SEQ ID NO: 5330 - DNA, 31 bp, Vibrio parahaemolyticus; identical to SEQ ID NO: 1877
  Vibrio parahaemolyticus CFSAN018771

SEQ ID NO: 5331 - DNA, 31 bp, Vibrio parahaemolyticus; identical to SEQ ID NO: 1878
  Vibrio parahaemolyticus CFSAN018771

SEQ ID NO: 5332 - DNA, 28 bp, Vibrio parahaemolyticus
  Vibrio parahaemolyticus CFSAN022332
gtgaactgccgaataggtagctgataat

SEQ ID NO: 5333 - DNA, 28 bp, Vibrio parahaemolyticus
  Vibrio parahaemolyticus CFSAN022332
gtgaactgccgcataggtagagaggatc

SEQ ID NO: 5334 - DNA, 28 bp, Vibrio parahaemolyticus
  Vibrio parahaemolyticus CFSAN022332
tcatcactactgaaaagtagctgataac

SEQ ID NO: 5335 - DNA, 28 bp, Vibrio parahaemolyticus
  Vibrio parahaemolyticus CFSAN022332
gaatactgccgaacaggtaggaggctca

SEQ ID NO: 5336 - DNA, 31 bp, Vibrio parahaemolyticus; identical to SEQ ID NO: 1876
  Vibrio parahaemolyticus CFSAN022332

SEQ ID NO: 5337 - DNA, 31 bp, Vibrio parahaemolyticus; identical to SEQ ID NO: 1877
  Vibrio parahaemolyticus CFSAN022332

SEQ ID NO: 5338 - DNA, 31 bp, Vibrio parahaemolyticus; identical to SEQ ID NO: 1878
  Vibrio parahaemolyticus CFSAN022332

SEQ ID NO: 5339 - DNA, 28 bp, Vibrio parahaemolyticus
  Vibrio parahaemolyticus MAVP-L
gtgaactgccgaataggtagctgataat

SEQ ID NO: 5340 - DNA, 28 bp, Vibrio parahaemolyticus
  Vibrio parahaemolyticus MAVP-L
gtgaactgccgcataggtagagaggatc

SEQ ID NO: 5341 - DNA, 28 bp, Vibrio parahaemolyticus
  Vibrio parahaemolyticus MAVP-L
tcatcactactgaaaagtagctgataac

SEQ ID NO: 5342 - DNA, 28 bp, Vibrio parahaemolyticus
  Vibrio parahaemolyticus MAVP-L
gaatactgccgaacaggtaggaggctca

SEQ ID NO: 5343 - DNA, 31 bp, Vibrio parahaemolyticus; identical to SEQ ID NO: 1876
  Vibrio parahaemolyticus MAVP-L

SEQ ID NO: 5344 - DNA, 31 bp, Vibrio parahaemolyticus; identical to SEQ ID NO: 1877
  Vibrio parahaemolyticus MAVP-L

SEQ ID NO: 5345 - DNA, 31 bp, Vibrio parahaemolyticus; identical to SEQ ID NO: 1878
  Vibrio parahaemolyticus MAVP-L

SEQ ID NO: 5346 - DNA, 28 bp, Vibrio parahaemolyticus
  Vibrio parahaemolyticus MAVP56
gtgaactgccgaataggtagctgataat

SEQ ID NO: 5347 - DNA, 28 bp, Vibrio parahaemolyticus
  Vibrio parahaemolyticus MAVP56
gtgaactgccgcataggtagagaggatc

SEQ ID NO: 5348 - DNA, 28 bp, Vibrio parahaemolyticus
  Vibrio parahaemolyticus MAVP56
tcatcactactgaaaagtagctgataac

SEQ ID NO: 5349 - DNA, 28 bp, Vibrio parahaemolyticus
  Vibrio parahaemolyticus MAVP56
gaatactgccgaacaggtaggaggctca

SEQ ID NO: 5350 - DNA, 31 bp, Vibrio parahaemolyticus; identical to SEQ ID NO: 1876
  Vibrio parahaemolyticus MAVP56

SEQ ID NO: 5351 - DNA, 31 bp, Vibrio parahaemolyticus; identical to SEQ ID NO: 1877
  Vibrio parahaemolyticus MAVP56

SEQ ID NO: 5352 - DNA, 31 bp, Vibrio parahaemolyticus; identical to SEQ ID NO: 1878
  Vibrio parahaemolyticus MAVP56

SEQ ID NO: 5353 - DNA, 28 bp, Vibrio parahaemolyticus
  Vibrio parahaemolyticus MAVP75
gtgaactgccgaataggtagctgataat

SEQ ID NO: 5354 - DNA, 28 bp, Vibrio parahaemolyticus
  Vibrio parahaemolyticus MAVP75
gtgaactgccgcataggtagagaggatc

SEQ ID NO: 5355 - DNA, 28 bp, Vibrio parahaemolyticus
  Vibrio parahaemolyticus MAVP75
tcatcactactgaaaagtagctgataac

SEQ ID NO: 5356 - DNA, 28 bp, Vibrio parahaemolyticus
  Vibrio parahaemolyticus MAVP75
gaatactgccgaacaggtaggaggctca

SEQ ID NO: 5357 - DNA, 31 bp, Vibrio parahaemolyticus; identical to SEQ ID NO: 1876
  Vibrio parahaemolyticus MAVP75

SEQ ID NO: 5358 - DNA, 31 bp, Vibrio parahaemolyticus; identical to SEQ ID NO: 1877
  Vibrio parahaemolyticus MAVP75

SEQ ID NO: 5359 - DNA, 31 bp, Vibrio parahaemolyticus; identical to SEQ ID NO: 1878
  Vibrio parahaemolyticus MAVP75

SEQ ID NO: 5360 - DNA, 28 bp, Vibrio anguillarum
  Vibrio anguillarum S3 4/9
gttcaccgccgcacaggcagctgataat

SEQ ID NO: 5361 - DNA, 28 bp, Vibrio anguillarum
  Vibrio anguillarum S3 4/9
gttcaccgccgcataggcagatttaatt

SEQ ID NO: 5362 - DNA, 32 bp, Vibrio anguillarum
  Vibrio anguillarum S3 4/9
ttcaaattgtcaccattttgaagaagccatga

SEQ ID NO: 5363 - DNA, 28 bp, Vibrio parahaemolyticus
  Vibrio parahaemolyticus MAVP-46
gtgaactgccgaataggtagctgataat

SEQ ID NO: 5364 - DNA, 28 bp, Vibrio parahaemolyticus
  Vibrio parahaemolyticus MAVP-46
atgaactgccgaataggtagagaggagc

SEQ ID NO: 5365 - DNA, 28 bp, Vibrio parahaemolyticus
  Vibrio parahaemolyticus MAVP-46
tcattactacttaaaagtagctgataac

SEQ ID NO: 5366 - DNA, 28 bp, Vibrio parahaemolyticus
  Vibrio parahaemolyticus MAVP-46
gaatactgccgaacaggtaggaggctca

SEQ ID NO: 5367 - DNA, 31 bp, Vibrio parahaemolyticus; identical to SEQ ID NO: 1897
  Vibrio parahaemolyticus MAVP-46

SEQ ID NO: 5368 - DNA, 31 bp, Vibrio parahaemolyticus; identical to SEQ ID NO: 1877
  Vibrio parahaemolyticus MAVP-46

SEQ ID NO: 5369 - DNA, 31 bp, Vibrio parahaemolyticus; identical to SEQ ID NO: 1970
  Vibrio parahaemolyticus MAVP-46

SEQ ID NO: 5370 - DNA, 28 bp, Vibrio parahaemolyticus
  Vibrio parahaemolyticus MAVP-67
gtgaactgccgaataggtagctgataat

SEQ ID NO: 5371 - DNA, 28 bp, Vibrio parahaemolyticus
  Vibrio parahaemolyticus MAVP-67
gtgaactgccgcataggtagagaggatc

SEQ ID NO: 5372 - DNA, 28 bp, Vibrio parahaemolyticus
  Vibrio parahaemolyticus MAVP-67
tcatcactacttaaaagtagctgataac

SEQ ID NO: 5373 - DNA, 28 bp, Vibrio parahaemolyticus
  Vibrio parahaemolyticus MAVP-67
gaatactgccgaacaggtaggaggctca

SEQ ID NO: 5374 - DNA, 31 bp, Vibrio parahaemolyticus; identical to SEQ ID NO: 2018
  Vibrio parahaemolyticus MAVP-67

SEQ ID NO: 5375 - DNA, 31 bp, Vibrio parahaemolyticus; identical to SEQ ID NO: 1947
  Vibrio parahaemolyticus MAVP-67

SEQ ID NO: 5376 - DNA, 31 bp, Vibrio parahaemolyticus; identical to SEQ ID NO: 1877
  Vibrio parahaemolyticus MAVP-67

SEQ ID NO: 5377 - DNA, 31 bp, Vibrio parahaemolyticus; identical to SEQ ID NO: 2146
  Vibrio parahaemolyticus MAVP-67

SEQ ID NO: 5378 - DNA, 28 bp, Shewanella sp.
  Shewanella sp. 10N.286.48.A6
gtgctcggccgcataggccgctaataat

SEQ ID NO: 5379 - DNA, 28 bp, Shewanella sp.
  Shewanella sp. 10N.286.48.A6
gaatacggccgaataggccgataggagc

SEQ ID NO: 5380 - DNA, 32 bp, Shewanella sp.
  Shewanella sp. 10N.286.48.A6
tcaaaacaatgctcaaccatacgcacctcagc

SEQ ID NO: 5381 - DNA, 32 bp, Shewanella sp.
  Shewanella sp. 10N.286.48.A6
atggataactgcagtgtgtcatatgaaggaat

SEQ ID NO: 5382 - DNA, 32 bp, Shewanella sp.
  Shewanella sp. 10N.286.48.A6
atgggccccaacgtcgctggtgtgctaggttg

SEQ ID NO: 5383 - DNA, 32 bp, Shewanella sp.
  Shewanella sp. 10N.286.48.A6
atggggccaaacgtggctggtgtattaggtag

SEQ ID NO: 5384 - DNA, 28 bp, Vibrio lentus
  Vibrio lentus 10N.261.55.E8
gtgaactgccgaataggtagctgataat

SEQ ID NO: 5385 - DNA, 28 bp, Vibrio lentus
  Vibrio lentus 10N.261.55.E8
gtgaactgcagagtaggtaggcccccac

SEQ ID NO: 5386 - DNA, 28 bp, Vibrio lentus
  Vibrio lentus 10N.261.55.E8
tcaaacttactgaaaagtagttgataac

SEQ ID NO: 5387 - DNA, 28 bp, Vibrio lentus
  Vibrio lentus 10N.261.55.E8
attaactgctgaataagtagacacttta

SEQ ID NO: 5388 - DNA, 32 bp, Vibrio lentus; identical to SEQ ID NO: 2754
  Vibrio lentus 10N.261.55.E8

SEQ ID NO: 5389 - DNA, 32 bp, Vibrio lentus; identical to SEQ ID NO: 2755
  Vibrio lentus 10N.261.55.E8

SEQ ID NO: 5390 - DNA, 32 bp, Vibrio lentus; identical to SEQ ID NO: 2756
  Vibrio lentus 10N.261.55.E8

SEQ ID NO: 5391 - DNA, 28 bp, Vibrio diazotrophicus
  Vibrio diazotrophicus 65.10M
gtgtactgccgagtaggtagctgataat

SEQ ID NO: 5392 - DNA, 28 bp, Vibrio diazotrophicus
  Vibrio diazotrophicus 65.10M
gtgtactgccgagtaggtagatagcttt

SEQ ID NO: 5393 - DNA, 28 bp, Vibrio diazotrophicus
  Vibrio diazotrophicus 65.10M
tcatcactactgtaaagtagctgataat

SEQ ID NO: 5394 - DNA, 28 bp, Vibrio diazotrophicus
  Vibrio diazotrophicus 65.10M
gaatactgccgaaaaggtagcaacgata

SEQ ID NO: 5395 - DNA, 32 bp, Vibrio diazotrophicus
  Vibrio diazotrophicus 65.10M
aaaaacacatcatcagttgaccaatcacgaat

SEQ ID NO: 5396 - DNA, 31 bp, Vibrio diazotrophicus; identical to SEQ ID NO: 2242
  Vibrio diazotrophicus 65.10M

SEQ ID NO: 5397 - DNA, 31 bp, Vibrio diazotrophicus
  Vibrio diazotrophicus 65.10M
aagttcacatcgcccggttctgctaaaaaac

SEQ ID NO: 5398 - DNA, 28 bp, Vibrio crassostreae
  Vibrio crassostreae 25_P_9
gtgtactgccgaataggtagctgataag

SEQ ID NO: 5399 - DNA, 28 bp, Vibrio crassostreae
  Vibrio crassostreae 25_P_9
gtgtactgccgaataggtagccatcaaa

SEQ ID NO: 5400 - DNA, 28 bp, Vibrio crassostreae
  Vibrio crassostreae 25_P_9
gtagctttagacataagcagccaattgg

SEQ ID NO: 5401 - DNA, 28 bp, Vibrio crassostreae
  Vibrio crassostreae 25_P_9
cctaactactgaaatagtagctgataat

SEQ ID NO: 5402 - DNA, 28 bp, Vibrio crassostreae
  Vibrio crassostreae 25_P_9
atatactgctgaataagtagatttttag

SEQ ID NO: 5403 - DNA, 32 bp, Vibrio crassostreae
  Vibrio crassostreae 25_P_9
tgaaacagagcttgaaatctacatggaaccaa

SEQ ID NO: 5404 - DNA, 36 bp, Vibrio crassostreae
  Vibrio crassostreae 25_P_9
ctgtttgttttactcacaaatgaggactataatcct

SEQ ID NO: 5405 - DNA, 32 bp, Vibrio crassostreae; identical to SEQ ID NO: 2994
  Vibrio crassostreae 25_P_9

SEQ ID NO: 5406 - DNA, 32 bp, Vibrio crassostreae
  Vibrio crassostreae 25_P_9
aagcgtacgactttcatccgtgtgcaagagca

SEQ ID NO: 5407 - DNA, 28 bp, Vibrio parahaemolyticus
  Vibrio parahaemolyticus 16763
gtgtactgccgcataggtagctgataat

SEQ ID NO: 5408 - DNA, 28 bp, Vibrio parahaemolyticus
  Vibrio parahaemolyticus 16763
gtgtactgccgcacaggtagctagtcga

SEQ ID NO: 5409 - DNA, 28 bp, Vibrio parahaemolyticus
  Vibrio parahaemolyticus 16763
ccagcactactgcgaagtagctgataaa

SEQ ID NO: 5410 - DNA, 28 bp, Vibrio parahaemolyticus
  Vibrio parahaemolyticus 16763
aattactgctgaataagtagatattgat

SEQ ID NO: 5411 - DNA, 32 bp, Vibrio parahaemolyticus
  Vibrio parahaemolyticus 16763
gcataaagatacgaagacgcaccaacggctac

SEQ ID NO: 5412 - DNA, 31 bp, Vibrio parahaemolyticus
  Vibrio parahaemolyticus 16763
aaacgaactacattcattcgagttcaagctc

SEQ ID NO: 5413 - DNA, 31 bp, Vibrio parahaemolyticus; identical to SEQ ID NO: 2386
  Vibrio parahaemolyticus 16763

SEQ ID NO: 5414 - DNA, 28 bp, Vibrio parahaemolyticus
  Vibrio parahaemolyticus G1_8
gtgaactgccgaataggtagctgataat

SEQ ID NO: 5415 - DNA, 28 bp, Vibrio parahaemolyticus
  Vibrio parahaemolyticus G1_8
gtgaactgccgcataggtagagagaatc

SEQ ID NO: 5416 - DNA, 28 bp, Vibrio parahaemolyticus
  Vibrio parahaemolyticus G1_8
tcattactactaaaaagtagctgataac

SEQ ID NO: 5417 - DNA, 28 bp, Vibrio parahaemolyticus
  Vibrio parahaemolyticus G1_8
gaatactgccgaacaggtaggaggctca

SEQ ID NO: 5418 - DNA, 32 bp, Vibrio parahaemolyticus; identical to SEQ ID NO: 1946
  Vibrio parahaemolyticus G1_8

SEQ ID NO: 5419 - DNA, 31 bp, Vibrio parahaemolyticus; identical to SEQ ID NO: 1947
  Vibrio parahaemolyticus G1_8

SEQ ID NO: 5420 - DNA, 31 bp, Vibrio parahaemolyticus; identical to SEQ ID NO: 1877
  Vibrio parahaemolyticus G1_8

SEQ ID NO: 5421 - DNA, 31 bp, Vibrio parahaemolyticus; identical to SEQ ID NO: 1878
  Vibrio parahaemolyticus G1_8

SEQ ID NO: 5422 - DNA, 28 bp, Vibrio parahaemolyticus
  Vibrio parahaemolyticus S178
gtgaactgccgaataggtagctgataat

SEQ ID NO: 5423 - DNA, 28 bp, Vibrio parahaemolyticus
  Vibrio parahaemolyticus S178
gtgaactgccgaataggtagagaggatc

SEQ ID NO: 5424 - DNA, 28 bp, Vibrio parahaemolyticus
  Vibrio parahaemolyticus S178
tcattactactgaaaagtagctgataac

SEQ ID NO: 5425 - DNA, 28 bp, Vibrio parahaemolyticus
  Vibrio parahaemolyticus S178
gaatactgccgaacaggtaggaggctca

SEQ ID NO: 5426 - DNA, 32 bp, Vibrio parahaemolyticus
  Vibrio parahaemolyticus S178
ataaagtttctttttctcatattcctgctcca

SEQ ID NO: 5427 - DNA, 32 bp, Vibrio parahaemolyticus; identical to SEQ ID NO: 2310
  Vibrio parahaemolyticus S178

SEQ ID NO: 5428 - DNA, 31 bp, Vibrio parahaemolyticus; identical to SEQ ID NO: 1877
  Vibrio parahaemolyticus S178

SEQ ID NO: 5429 - DNA, 31 bp, Vibrio parahaemolyticus; identical to SEQ ID NO: 1878
  Vibrio parahaemolyticus S178

SEQ ID NO: 5430 - DNA, 28 bp, Vibrio parahaemolyticus
  Vibrio parahaemolyticus G1_4
gtgaactgccgaataggtagctgataat

SEQ ID NO: 5431 - DNA, 28 bp, Vibrio parahaemolyticus
  Vibrio parahaemolyticus G1_4
gtgaactgccgcataggtagagagaatc

SEQ ID NO: 5432 - DNA, 28 bp, Vibrio parahaemolyticus
  Vibrio parahaemolyticus G1_4
tcattactactaaaaagtagctgataac

SEQ ID NO: 5433 - DNA, 28 bp, Vibrio parahaemolyticus
  Vibrio parahaemolyticus G1_4
gaatactgccgaacaggtaggaggctca

SEQ ID NO: 5434 - DNA, 32 bp, Vibrio parahaemolyticus; identical to SEQ ID NO: 1946
  Vibrio parahaemolyticus G1_4

SEQ ID NO: 5435 - DNA, 31 bp, Vibrio parahaemolyticus; identical to SEQ ID NO: 1947
  Vibrio parahaemolyticus G1_4

SEQ ID NO: 5436 - DNA, 31 bp, Vibrio parahaemolyticus; identical to SEQ ID NO: 1877
  Vibrio parahaemolyticus G1_4

SEQ ID NO: 5437 - DNA, 31 bp, Vibrio parahaemolyticus; identical to SEQ ID NO: 1878
  Vibrio parahaemolyticus G1_4

SEQ ID NO: 5438 - DNA, 28 bp, Vibrio parahaemolyticus
  Vibrio parahaemolyticus F9_2
gtgaactgccgaataggtagctgataat

SEQ ID NO: 5439 - DNA, 28 bp, Vibrio parahaemolyticus
  Vibrio parahaemolyticus F9_2
gtgaactgccgaataggtagagagaagc

SEQ ID NO: 5440 - DNA, 28 bp, Vibrio parahaemolyticus
  Vibrio parahaemolyticus F9_2
tcatcactactgaaaagtagctgataac

SEQ ID NO: 5441 - DNA, 28 bp, Vibrio parahaemolyticus
  Vibrio parahaemolyticus F9_2
gaatactgccgaacaggtaggaggctca

SEQ ID NO: 5442 - DNA, 32 bp, Vibrio parahaemolyticus; identical to SEQ ID NO: 2279
  Vibrio parahaemolyticus F9_2

SEQ ID NO: 5443 - DNA, 31 bp, Vibrio parahaemolyticus; identical to SEQ ID NO: 1877
  Vibrio parahaemolyticus F9_2

SEQ ID NO: 5444 - DNA, 31 bp, Vibrio parahaemolyticus; identical to SEQ ID NO: 1970
  Vibrio parahaemolyticus F9_2

SEQ ID NO: 5445 - DNA, 28 bp, Vibrio parahaemolyticus
  Vibrio parahaemolyticus F3_9
gtgaactgccgaataggtagctgataat

SEQ ID NO: 5446 - DNA, 28 bp, Vibrio parahaemolyticus
  Vibrio parahaemolyticus F3_9
gtgaactgccgcataggtagagagaatc

SEQ ID NO: 5447 - DNA, 28 bp, Vibrio parahaemolyticus
  Vibrio parahaemolyticus F3_9
tcattactactaaaaagtagctgataac

SEQ ID NO: 5448 - DNA, 28 bp, Vibrio parahaemolyticus
  Vibrio parahaemolyticus F3_9
gaatactgccgaacaggtaggaggctca

SEQ ID NO: 5449 - DNA, 32 bp, Vibrio parahaemolyticus; identical to SEQ ID NO: 1946
  Vibrio parahaemolyticus F3_9

SEQ ID NO: 5450 - DNA, 31 bp, Vibrio parahaemolyticus; identical to SEQ ID NO: 1947
  Vibrio parahaemolyticus F3_9

SEQ ID NO: 5451 - DNA, 31 bp, Vibrio parahaemolyticus; identical to SEQ ID NO: 1877
  Vibrio parahaemolyticus F3_9

SEQ ID NO: 5452 - DNA, 31 bp, Vibrio parahaemolyticus; identical to SEQ ID NO: 1878
  Vibrio parahaemolyticus F3_9

SEQ ID NO: 5453 - DNA, 28 bp, Vibrio parahaemolyticus
  Vibrio parahaemolyticus F3_5
gtgaactgccgaataggtagctgataat

SEQ ID NO: 5454 - DNA, 28 bp, Vibrio parahaemolyticus
  Vibrio parahaemolyticus F3_5
gtgaactgccgcataggtagagagaatc

SEQ ID NO: 5455 - DNA, 28 bp, Vibrio parahaemolyticus
  Vibrio parahaemolyticus F3_5
tcattactactaaaaagtagctgataac

SEQ ID NO: 5456 - DNA, 28 bp, Vibrio parahaemolyticus
  Vibrio parahaemolyticus F3_5
gaatactgccgaacaggtaggaggctca

SEQ ID NO: 5457 - DNA, 32 bp, Vibrio parahaemolyticus; identical to SEQ ID NO: 1946
  Vibrio parahaemolyticus F3_5

SEQ ID NO: 5458 - DNA, 31 bp, Vibrio parahaemolyticus; identical to SEQ ID NO: 1947
  Vibrio parahaemolyticus F3_5

SEQ ID NO: 5459 - DNA, 31 bp, Vibrio parahaemolyticus; identical to SEQ ID NO: 1877
  Vibrio parahaemolyticus F3_5

SEQ ID NO: 5460 - DNA, 31 bp, Vibrio parahaemolyticus; identical to SEQ ID NO: 1878
  Vibrio parahaemolyticus F3_5

SEQ ID NO: 5461 - DNA, 28 bp, Vibrio parahaemolyticus
  Vibrio parahaemolyticus F3_2
gtgaactgccgaataggtagctgataat

SEQ ID NO: 5462 - DNA, 28 bp, Vibrio parahaemolyticus
  Vibrio parahaemolyticus F3_2
gtgaactgccgcataggtagagagaatc

SEQ ID NO: 5463 - DNA, 28 bp, Vibrio parahaemolyticus
  Vibrio parahaemolyticus F3_2
tcattactactaaaaagtagctgataac

SEQ ID NO: 5464 - DNA, 28 bp, Vibrio parahaemolyticus
  Vibrio parahaemolyticus F3_2
gaatactgccgaacaggtaggaggctca

SEQ ID NO: 5465 - DNA, 32 bp, Vibrio parahaemolyticus; identical to SEQ ID NO: 1946
  Vibrio parahaemolyticus F3_2

SEQ ID NO: 5466 - DNA, 31 bp, Vibrio parahaemolyticus; identical to SEQ ID NO: 1947
  Vibrio parahaemolyticus F3_2

SEQ ID NO: 5467 - DNA, 31 bp, Vibrio parahaemolyticus; identical to SEQ ID NO: 1877
  Vibrio parahaemolyticus F3_2

SEQ ID NO: 5468 - DNA, 31 bp, Vibrio parahaemolyticus; identical to SEQ ID NO: 1878
  Vibrio parahaemolyticus F3_2

SEQ ID NO: 5469 - DNA, 28 bp, Vibrio parahaemolyticus
  Vibrio parahaemolyticus F3_6
gtgaactgccgaataggtagctgataat

SEQ ID NO: 5470 - DNA, 28 bp, Vibrio parahaemolyticus
  Vibrio parahaemolyticus F3_6
gtgaactgccgcataggtagagagaatc

SEQ ID NO: 5471 - DNA, 28 bp, Vibrio parahaemolyticus
  Vibrio parahaemolyticus F3_6
tcattactactaaaaagtagctgataac

SEQ ID NO: 5472 - DNA, 28 bp, Vibrio parahaemolyticus
  Vibrio parahaemolyticus F3_6
gaatactgccgaacaggtaggaggctca

SEQ ID NO: 5473 - DNA, 32 bp, Vibrio parahaemolyticus; identical to SEQ ID NO: 1946
  Vibrio parahaemolyticus F3_6

SEQ ID NO: 5474 - DNA, 31 bp, Vibrio parahaemolyticus; identical to SEQ ID NO: 1947
  Vibrio parahaemolyticus F3_6

SEQ ID NO: 5475 - DNA, 31 bp, Vibrio parahaemolyticus; identical to SEQ ID NO: 1877
  Vibrio parahaemolyticus F3_6

SEQ ID NO: 5476 - DNA, 31 bp, Vibrio parahaemolyticus; identical to SEQ ID NO: 1878
  Vibrio parahaemolyticus F3_6

SEQ ID NO: 5477 - DNA, 28 bp, Vibrio parahaemolyticus
  Vibrio parahaemolyticus F2_8
gtgaactgccgaataggtagctgataat

SEQ ID NO: 5478 - DNA, 28 bp, Vibrio parahaemolyticus
  Vibrio parahaemolyticus F2_8
gtgaactgccgcataggtagagagaatc

SEQ ID NO: 5479 - DNA, 28 bp, Vibrio parahaemolyticus
  Vibrio parahaemolyticus F2_8
tcattactactaaaaagtagctgataac

SEQ ID NO: 5480 - DNA, 28 bp, Vibrio parahaemolyticus
  Vibrio parahaemolyticus F2_8
gaatactgccgaacaggtaggaggctca

SEQ ID NO: 5481 - DNA, 32 bp, Vibrio parahaemolyticus; identical to SEQ ID NO: 1946
  Vibrio parahaemolyticus F2_8

SEQ ID NO: 5482 - DNA, 31 bp, Vibrio parahaemolyticus; identical to SEQ ID NO: 1947
  Vibrio parahaemolyticus F2_8

SEQ ID NO: 5483 - DNA, 31 bp, Vibrio parahaemolyticus; identical to SEQ ID NO: 1877
  Vibrio parahaemolyticus F2_8

SEQ ID NO: 5484 - DNA, 31 bp, Vibrio parahaemolyticus; identical to SEQ ID NO: 1878
  Vibrio parahaemolyticus F2_8

SEQ ID NO: 5485 - DNA, 28 bp, Vibrio parahaemolyticus
  Vibrio parahaemolyticus VP900008
gtgaactgccgaataggtagctgataat

SEQ ID NO: 5486 - DNA, 28 bp, Vibrio parahaemolyticus
  Vibrio parahaemolyticus VP900008
gtgaactgccgcataggtagagagaatc

SEQ ID NO: 5487 - DNA, 28 bp, Vibrio parahaemolyticus
  Vibrio parahaemolyticus VP900008
tcattactactaaaaagtagctgataac

SEQ ID NO: 5488 - DNA, 28 bp, Vibrio parahaemolyticus
  Vibrio parahaemolyticus VP900008
gaatactgccgaacaggtaggaggctca

SEQ ID NO: 5489 - DNA, 32 bp, Vibrio parahaemolyticus; identical to SEQ ID NO: 2035
  Vibrio parahaemolyticus VP900008

SEQ ID NO: 5490 - DNA, 31 bp, Vibrio parahaemolyticus; identical to SEQ ID NO: 1947
  Vibrio parahaemolyticus VP900008

SEQ ID NO: 5491 - DNA, 31 bp, Vibrio parahaemolyticus; identical to SEQ ID NO: 1877
  Vibrio parahaemolyticus VP900008

SEQ ID NO: 5492 - DNA, 31 bp, Vibrio parahaemolyticus; identical to SEQ ID NO: 1878
  Vibrio parahaemolyticus VP900008

SEQ ID NO: 5493 - DNA, 28 bp, Vibrio parahaemolyticus
  Vibrio parahaemolyticus VP110008
gtgaactgccgaataggtagctgataat

SEQ ID NO: 5494 - DNA, 28 bp, Vibrio parahaemolyticus
  Vibrio parahaemolyticus VP110008
gtgaactgccgcataggtagagagaatc

SEQ ID NO: 5495 - DNA, 28 bp, Vibrio parahaemolyticus
  Vibrio parahaemolyticus VP110008
tcattactactaaaaagtagctgataac

SEQ ID NO: 5496 - DNA, 28 bp, Vibrio parahaemolyticus
  Vibrio parahaemolyticus VP110008
gaatactgccgaacaggtaggaggctca

SEQ ID NO: 5497 - DNA, 32 bp, Vibrio parahaemolyticus; identical to SEQ ID NO: 2035
  Vibrio parahaemolyticus VP110008

SEQ ID NO: 5498 - DNA, 31 bp, Vibrio parahaemolyticus; identical to SEQ ID NO: 1947
  Vibrio parahaemolyticus VP110008

SEQ ID NO: 5499 - DNA, 31 bp, Vibrio parahaemolyticus; identical to SEQ ID NO: 1877
  Vibrio parahaemolyticus VP110008

SEQ ID NO: 5500 - DNA, 31 bp, Vibrio parahaemolyticus; identical to SEQ ID NO: 1878
  Vibrio parahaemolyticus VP110008

SEQ ID NO: 5501 - DNA, 28 bp, Vibrio parahaemolyticus
  Vibrio parahaemolyticus VP840119
gtgaactgccgaataggtagctgataat

SEQ ID NO: 5502 - DNA, 28 bp, Vibrio parahaemolyticus
  Vibrio parahaemolyticus VP840119
gtgaactgccgcataggtagagagaatc

SEQ ID NO: 5503 - DNA, 28 bp, Vibrio parahaemolyticus
  Vibrio parahaemolyticus VP840119
tcattactactaaaaagtagctgataac

SEQ ID NO: 5504 - DNA, 28 bp, Vibrio parahaemolyticus
  Vibrio parahaemolyticus VP840119
gaatactgccgaacaggtaggaggctca

SEQ ID NO: 5505 - DNA, 32 bp, Vibrio parahaemolyticus; identical to SEQ ID NO: 2035
  Vibrio parahaemolyticus VP840119

SEQ ID NO: 5506 - DNA, 31 bp, Vibrio parahaemolyticus; identical to SEQ ID NO: 1947
  Vibrio parahaemolyticus VP840119

SEQ ID NO: 5507 - DNA, 31 bp, Vibrio parahaemolyticus; identical to SEQ ID NO: 1877
  Vibrio parahaemolyticus VP840119

SEQ ID NO: 5508 - DNA, 31 bp, Vibrio parahaemolyticus; identical to SEQ ID NO: 2038
  Vibrio parahaemolyticus VP840119

SEQ ID NO: 5509 - DNA, 28 bp, Vibrio parahaemolyticus
  Vibrio parahaemolyticus VP161407
gtgaactgccgaataggtagctgataat

SEQ ID NO: 5510 - DNA, 28 bp, Vibrio parahaemolyticus
  Vibrio parahaemolyticus VP161407
gtgaactgccgcataggtagagagaatc

SEQ ID NO: 5511 - DNA, 28 bp, Vibrio parahaemolyticus
  Vibrio parahaemolyticus VP161407
tcattactactaaaaagtagctgataac

SEQ ID NO: 5512 - DNA, 28 bp, Vibrio parahaemolyticus
  Vibrio parahaemolyticus VP161407
gaatactgccgaacaggtaggaggctca

SEQ ID NO: 5513 - DNA, 32 bp, Vibrio parahaemolyticus; identical to SEQ ID NO: 1946
  Vibrio parahaemolyticus VP161407

SEQ ID NO: 5514 - DNA, 31 bp, Vibrio parahaemolyticus; identical to SEQ ID NO: 1947
  Vibrio parahaemolyticus VP161407

SEQ ID NO: 5515 - DNA, 31 bp, Vibrio parahaemolyticus; identical to SEQ ID NO: 1877
  Vibrio parahaemolyticus VP161407

SEQ ID NO: 5516 - DNA, 31 bp, Vibrio parahaemolyticus; identical to SEQ ID NO: 1878
  Vibrio parahaemolyticus VP161407

SEQ ID NO: 5517 - DNA, 28 bp, Vibrio parahaemolyticus
  Vibrio parahaemolyticus VP170054
gtgaactgccgaataggtagctgataat

SEQ ID NO: 5518 - DNA, 28 bp, Vibrio parahaemolyticus
  Vibrio parahaemolyticus VP170054
gtgaactgccgcataggtagagagaatc

SEQ ID NO: 5519 - DNA, 28 bp, Vibrio parahaemolyticus
  Vibrio parahaemolyticus VP170054
tcattactactaaaaagtagctgataac

SEQ ID NO: 5520 - DNA, 28 bp, Vibrio parahaemolyticus
  Vibrio parahaemolyticus VP170054
gaatactgccgaacaggtaggaggctca

SEQ ID NO: 5521 - DNA, 32 bp, Vibrio parahaemolyticus; identical to SEQ ID NO: 2035
  Vibrio parahaemolyticus VP170054

SEQ ID NO: 5522 - DNA, 31 bp, Vibrio parahaemolyticus; identical to SEQ ID NO: 1947
  Vibrio parahaemolyticus VP170054

SEQ ID NO: 5523 - DNA, 31 bp, Vibrio parahaemolyticus; identical to SEQ ID NO: 1877
  Vibrio parahaemolyticus VP170054

SEQ ID NO: 5524 - DNA, 31 bp, Vibrio parahaemolyticus; identical to SEQ ID NO: 1878
  Vibrio parahaemolyticus VP170054

SEQ ID NO: 5525 - DNA, 28 bp, Vibrio parahaemolyticus
  Vibrio parahaemolyticus VP160968
gtgaactgccgaataggtagctgataat

SEQ ID NO: 5526 - DNA, 28 bp, Vibrio parahaemolyticus
  Vibrio parahaemolyticus VP160968
gtgaactgccgcataggtagagagaatc

SEQ ID NO: 5527 - DNA, 28 bp, Vibrio parahaemolyticus
  Vibrio parahaemolyticus VP160968
tcattactactaaaaagtagctgataac

SEQ ID NO: 5528 - DNA, 28 bp, Vibrio parahaemolyticus
  Vibrio parahaemolyticus VP160968
gaatactgccgaacaggtaggaggctca

SEQ ID NO: 5529 - DNA, 32 bp, Vibrio parahaemolyticus; identical to SEQ ID NO: 2035
  Vibrio parahaemolyticus VP160968

SEQ ID NO: 5530 - DNA, 31 bp, Vibrio parahaemolyticus; identical to SEQ ID NO: 1947
  Vibrio parahaemolyticus VP160968

SEQ ID NO: 5531 - DNA, 31 bp, Vibrio parahaemolyticus; identical to SEQ ID NO: 1877
  Vibrio parahaemolyticus VP160968

SEQ ID NO: 5532 - DNA, 31 bp, Vibrio parahaemolyticus; identical to SEQ ID NO: 1878
  Vibrio parahaemolyticus VP160968

SEQ ID NO: 5533 - DNA, 28 bp, Vibrio parahaemolyticus
  Vibrio parahaemolyticus VP830010
gtgaactgccgaataggtagctgataat

SEQ ID NO: 5534 - DNA, 28 bp, Vibrio parahaemolyticus
  Vibrio parahaemolyticus VP830010
gtgaactgccgcataggtagagagaatc

SEQ ID NO: 5535 - DNA, 28 bp, Vibrio parahaemolyticus
  Vibrio parahaemolyticus VP830010
tcattactactaaaaagtagctgataac

SEQ ID NO: 5536 - DNA, 28 bp, Vibrio parahaemolyticus
  Vibrio parahaemolyticus VP830010
gaatactgccgaacaggtaggaggctca

SEQ ID NO: 5537 - DNA, 32 bp, Vibrio parahaemolyticus; identical to SEQ ID NO: 2035
  Vibrio parahaemolyticus VP830010

SEQ ID NO: 5538 - DNA, 31 bp, Vibrio parahaemolyticus; identical to SEQ ID NO: 1947
  Vibrio parahaemolyticus VP830010

SEQ ID NO: 5539 - DNA, 31 bp, Vibrio parahaemolyticus; identical to SEQ ID NO: 1877
  Vibrio parahaemolyticus VP830010

SEQ ID NO: 5540 - DNA, 31 bp, Vibrio parahaemolyticus; identical to SEQ ID NO: 1878
  Vibrio parahaemolyticus VP830010

SEQ ID NO: 5541 - DNA, 28 bp, Vibrio parahaemolyticus
  Vibrio parahaemolyticus HZ13-102
gtgaactgccgaataggtagctgataat

SEQ ID NO: 5542 - DNA, 28 bp, Vibrio parahaemolyticus
  Vibrio parahaemolyticus HZ13-102
gtgaactgccgcataggtagagagaatc

SEQ ID NO: 5543 - DNA, 28 bp, Vibrio parahaemolyticus
  Vibrio parahaemolyticus HZ13-102
tcattactactaaaaagtagctgataac

SEQ ID NO: 5544 - DNA, 28 bp, Vibrio parahaemolyticus
  Vibrio parahaemolyticus HZ13-102
gaatactgccgaacaggtaggaggctca

SEQ ID NO: 5545 - DNA, 32 bp, Vibrio parahaemolyticus; identical to SEQ ID NO: 2034
  Vibrio parahaemolyticus HZ13-102

SEQ ID NO: 5546 - DNA, 32 bp, Vibrio parahaemolyticus; identical to SEQ ID NO: 2035
  Vibrio parahaemolyticus HZ13-102

SEQ ID NO: 5547 - DNA, 31 bp, Vibrio parahaemolyticus; identical to SEQ ID NO: 1947
  Vibrio parahaemolyticus HZ13-102

SEQ ID NO: 5548 - DNA, 31 bp, Vibrio parahaemolyticus; identical to SEQ ID NO: 1877
  Vibrio parahaemolyticus HZ13-102

SEQ ID NO: 5549 - DNA, 31 bp, Vibrio parahaemolyticus; identical to SEQ ID NO: 1878
  Vibrio parahaemolyticus HZ13-102

SEQ ID NO: 5550 - DNA, 28 bp, Photobacterium sp.
  Photobacterium sp. CECT 9192
gtatactgccgagtaggtagctgataac

SEQ ID NO: 5551 - DNA, 28 bp, Photobacterium sp.
  Photobacterium sp. CECT 9192
gtgtactgccgagtaggtagctgataac

SEQ ID NO: 5552 - DNA, 32 bp, Photobacterium sp.
  Photobacterium sp. CECT 9192
tctgacaaaaactcaaaccacacatacttgat

SEQ ID NO: 5553 - DNA, 32 bp, Photobacterium sp.
  Photobacterium sp. CECT 9192
aatgtctacacattacaaggcttatttgcagc

SEQ ID NO: 5554 - DNA, 32 bp, Photobacterium sp.
  Photobacterium sp. CECT 9192
aatgtatacgcattacaaggcttacttgcagc

SEQ ID NO: 5555 - DNA, 13150 bp, Artificial Sequence
  Description of Artificial Sequence: Synthetic polynucleotide
tactgacaggaaaatgggccattggcaaccagggaaagatgaacgtgatgatgttcacaatttgctgaattgtggtgatgtgatgctcaccgcatttccttaattaacgccggatggtagtgtggggtctccccatgcgagagtagggaactgccaggcatcaaataaaacgaaaggctcagtcgaaagactgggcctttcgttttatctgttgtttgtcggtgaacgctctcctgagtaggacaaatccgccgggagcggatttgaacgttgcgaagcaacggcccggagggtggcgggcaggacgcccgccataaactgccaggcatcaaattaagcagaaggccatcctgacggatggcctttttgcgtttagttagttatctcctaggacgcgccacggccgcgtcgaccccacgcccctctttaatacgacgggcaatttgcacttcagaaaatgaagagtttgctttagccataacaaaagtccagtatgctttttcacagcataactggactgatttcagtttacaactattctgtctagtttaagactttattgtcatagtttagatctattttgttcagtttaagactttattgtccgcccacaggccacgatgcgtccggcgtagaggatctgctcatgtttgacagcttatcatcgatgcataatgtgcctgtcaaatggacgaagcagggattctgcaaaccctatgctactccgtcaagccgtcaattgtctgattcgttaccaattatgacaacttgacggctacatcattcactttttcttcacaaccggcacggaactcgctcgggctggccccggtgcattttttaaatacccgcgagaaatagagttgatcgtcaaaaccaacattgcgaccgacggtggcgataggcatccgggtggtgctcaaaagcagcttcgcctggctgatacgttggtcctcgcgccagcttaagacgctaatccctaactgctggcggaaaagatgtgacagacgcgacggcgacaagcaaacatgctgtgcgacgctggcgatatcaaaattgctgtctgccaggtgatcgctgatgtactgacaagcctcgcgtacccgattatccatcggtggatggagcgactcgttaatcgcttccatgcgccgcagtaacaattgctcaagcagatttatcgccagcagctccgaatagcgcccttccccttgcccggcgttaatgatttgcccaaacaggtcgctgaaatgcggctggtgcgcttcatccgggcgaaagaaccccgtattggcaaatattgacggccagttaagccattcatgccagtaggcgcgcggacgaaagtaaacccactggtgataccattcgcgagcctccggatgacgaccgtagtgatgaatctctcctggcgggaacagcaaaatatcacccggtcggcaaacaaattctcgtccctgatttttcaccaccccctgaccgcgaatggtgagattgagaatataacctttcattcccagcggtcggtcgataaaaaaatcgagataaccgttggcctcaatcggcgttaaacccgccaccagatgggcattaaacgagtatcccggcagcaggggatcattttgcgcttcagccatacttttcatactcccgccattcagagaagaaaccaattgtccatattgcatcagacattgccgtcactgcgtcttttactggctcttctcgctaaccaaaccggtaaccccgcttattaaaagcattctgtaacaaagcgggaccaaagccatgacaaaaacgcgtaacaaaagtgtctataatcacggcagaaaagtccacattgattatttgcacggcgtcacactttgctatgccatagcatttttatccataagattagcggatcctacctgacgctttttatcgcaactctctactgtttctccatacccgtttttttgggctagcgaattcgagctcggtacccaagtcttaaactagacagaatagttgtaaactgaaatcagtccagttatgctgtgaaaaagcatactggacttttgttatggctaaagcaaactcttcattttctgaagtgcaaattgcccgtcgtattaaagaggggcgtggccaagggcatggtaaagactatattccatggctaacagtacaagaagttccttcttcaggtcgttcccaccgtatttattctcataagacgggacgagtccatcatttgctatctgacttagagcttgctgtttttctcagtcttgagtgggagagcagcgtgctagatatacgcgagcagttccccttattacctagtgataccaggcagattgcaatagatagtggtattaagcatcctgttattcgtggtgtagatcaggttatgtctactgattttttagtggactgcaaagatggtccttttgagcagtttgctattcaagtcaaacctgcagcagccttacaagacgagcgtaccttagaaaaactagaactagagcgtcgctattggcagcaaaagcaaattccttggttcatttttactgataaagaaataaatcccgtagtaaaagaaaatattgaatggctttattcagtgaaaacagaagaagtttctgcggagcttttagcacaactatccccattggcccatatcctgcaagaaaaaggagatgaaaacattatcaatgtctgtaagcaggttgatattgcttatgatttggagttaggcaaaacattgagtgagatacgagccttaaccgcaaatggttttattaagttcaatatttataagtctttcagggcaaataagtgtgcagatctctgtattagccaagtagtgaatatggaggagttgcgctatgtggcaaattaatgaggttgtgctatttgataatgatccgtatcgcattttggctatagaggatggccaagttgtctggatgcaaataagcgctgataaaggagttccacaagctagggctgagttgttgctaatgcagtatttagatgaaggccgcttagttagaactgatgacccttatgtacatcttgatttagaagagccgtctgtagattctgtcagcttccagaagcgcgaggaggattatcgaaaaattcttcctattattaatagtaaggatcgtttcgaccctaaagtcagaagcgaactcgttgagcatgtggtccaagaacataaggttactaaggctacagtttataagttgttacgccgttactggcagcgtggtcaaacgcctaatgcattaattcctgactacaaaaacagcggtgcaccaggggaaagacgttcagcgacaggaacagcaaagattggccgagccagagaatatggtaagggtgaaggaaccaaggtaacgcccgagattgaacgcctttttaggttgaccatagaaaagcacctgttaaatcaaaaaggtacaaagaccaccgttgcctatagacgatttgtggacttgtttgctcagtattttcctcgcattccccaagaggattacccaacactacgtcagtttcgttatttttatgatcgagaataccctaaagctcagcgcttaaagtctagagttaaagcaggggtatataaaaaagacgtacgacccttaagtagtacagccacttctcaggcgttaggccctgggagtcgttatgagattgatgccacgattgctgatatttatttagtggatcatcatgatcgccaaaaaatcataggaagaccaacgctttacattgtgattgatgtgtttagtcggatgatcacgggcttttatatcggctttgaaaatccgtcttatgtggtggcgatgcaggcttttgtaaatgcttgctctgacaaaacggccatttgtgcccagcatgatattgagattagtagctcagactggccgtgtgtaggtttgccagatgtgttgctagcggaccgtggcgaattaatgagtcatcaggtcgaagccttagtttctagttttaatgtgcgagtggaaagtgctccacctagacgtggcgatgctaaaggcatagtggaaagcacttttagaacactacaagccgagtttaagtcctttgcacctggcattgtagagggcagtcggatcaaaagccatggtgaaacagactataggttagatgcatctctgtcggtatttgagttcacacaaattattttgcgtacgatcttattcagaaataaccatctggtgatggataaatacgatcgagatgctgattttcctacagatttaccgtctattcctgtccagctatggcaatggggtatgcagcatcgtacaggtagtttaagggctgtggagcaagagcagttgcgagtagcgttactgcctcgccgaaaggtctctatttcttcatttggcgttaatttgtggggtttgtattactcggggtcagagattctgcgtgagggttggttgcagcggagcactgatatagctagacctcaacatttagaagcggcttatgacccagtgctggttgatacgatttatttgtttccgcaagttggcagccgtgtattttggcgctgtaatctgacggaacgtagtcggcagtttaaaggtctctcattttgggaggtttgggatatacaagcacaagaaaaacacaataaagccaatgcgaagcaggatgagttaactaaacgcagggagcttgaggcgtttattcagcaaaccattcagaaagcgaataagttaacgcccagtactactgagcccaaatcaacacgcattaagcagattaaaactaataaaaaagaagccgtgacctcggagcgtaaaaaacgtgcggagcatttgaagccaagctcttcaggtgatgaggctaaagttattcctttcaacgcagtggaagcggatgatcaagaagattacagcctacccacatacgtgcctgaattatttcaggatccaccagaaaaggatgagtcatgagtgctacccggattcaagcagtttatcgtgatacgggggtagaggcttatcgtgataatccttttatcgaggccttaccaccattacaagagtcagtgaatagtgctgcatcactgaaatcctctttacagcttacttcctctgacttgcaaaagtcccgtgttatcagagctcataccatttgtcgtattccagatgactattttcagccattaggtacgcatttgctactaagtgagcgtatttcggtcatgattcgaggtggctacgtaggcagaaatcctaaaacaggagatttacaaaagcatttacaaaatggttatgagcgtgttcaaacgggagagttggagacatttcgctttgaggaggcacgatctacggcacaaagcttattgttaattggttgttctggtagtgggaagacgacctctcttcatcgtattctagccacgtatcctcaggtgatttaccatcgtgaactcaatgtagagcaggtggtgtatttgaaaatagactgctcgcataatggttcgctaaaagaaatctgcttgaattttttcagagcgttggatcgagccttgggctcgaactatgagcgtcgttatggcttaaaacgtcatggtatagaaaccatgttggctttgatgtcgcaaatagccaatgcacatgctttagggttgttggttattgatgaaattcagcatttaagccgctctcgttcgggtggatctcaagagatgctgaacttttttgtgacgatggtgaatattattggcgtaccagtgatgttgattggtacccctaaagcacgagagatttttgaggctgatttgcggtctgcacgtagaggggcagggtttggagctatattctgggatcctatacaacaaacgcaacgtggaaagcccaatcaagagtggatcgcttttacggataatctttggcaattacagcttttacaacgcaaagatgcgctgttatcggatgaggtccgtgatgtgtggtatgagctaagccaaggagtgatggacattgtagtaaaactttttgtactcgctcagctccgtgcgctagctttaggcaatgagcgtattaccgctggtttattgcggcaagtgtatcaagatgagttaaagcctgtgcaccccatgctagaggcattacgctcgggtatcccagaacgcattgctcgttattctgatctagtcgttcccgagattgataaacggttaatccaacttcagctagatatcgcagcgatacaagaacaaacaccagaagaaaaagcccttcaagagttagataccgaagatcagcgtcatttatatctgatgctgaaagaggattacgattcaagcctgttaattcccactattaaaaaagcgtttagccagaatccaacgatgacaagacaaaagttactgcctcttgttttgcagtggttgatggaaggcgaaacggtagtgtcagaactagaaaagccctccaagagtaaaaaggtttcggctataaaggtagtcaagcccagcgactgggatagcttgcctgatacggatttacgttatatctattcacaacgccaacctgaaaaaaccatgcatgaacggttaaaagggaaaggggtaatagtggatatggcgagcttatttaaacaagcaggttagccatgagaaactttcctgttccgtactcgaatgagctgatttatagcactattgcacgggcaggcgtttatcaagggattgttagtcctaagcagctgttggatgaggtgtatggcaaccgcaaggtggtcgctaccttaggtctgccctcgcatttaggtgtgatagcaagacatctacatcaaacaggacgttacgctgttcagcagcttatttatgagcataccttattccctttatatgctccgtttgtaggcaaggagcgccgagacgaagctattcggttaatggagtaccaagcgcaaggtgcggtgcatttaatgctaggagtcgctgcttctagagttaagagcgataaccgctttagatactgccctgattgcgttgctcttcagctaaataggtatggggaagccttttggcaacgagattggtatttgcccgctttgccatattgtccaaaacacggtgctttagtcttctttgatagagctgtagatgatcaccgacatcaattttgggctttgggtcatactgagctgctttcagactaccccaaagactccctatctcaattaacagcactagctgcttatatagcccctctgttagatgctccacgagcgcaagagctttccccaagccttgagcagtggacgctgttttatcagcgcttagcgcaggatctagggctaaccaaaagcaagcacattcgtcatgacttggtggcggagagagtgaggcagacttttagtgatgaggcactagagaaactggatttaaagttggcagagaacaaggacacgtgttggctgaaaagtatattccgtaagcatagaaaagcctttagttatttacagcatagtattgtgtggcaagccttattgccaaaactaacggttatagaagcgctacagcaggcaagtgctcttactgagcactctataacgacaagacctgttagccagtctgtgcaacctaactctgaagatttatctgttaagcataaagactggcagcaactagtgcataaataccaaggaattaaggcggcaagacagtctttagagggtggggtgctatacgcttggctttaccgacatgacagggattggctagttcactggaatcaacagcatcaacaagagcgtctggcacccgcccctagagttgattggaaccaaagagatcgaattgctgtacgacaactattaagaatcataaagcgtctagatagtagccttgatcacccaagagcgacatcgagctggctgttaaagcaaactcctaacggaacctctcttgcaaaaaatctacagaaactgcctttggtagcgctttgcttaaagcgttactcagagagtgtggaagattatcaaattagacggattagccaagcttttattaagcttaaacaggaagatgttgagcttaggcgctggcgattattaagaagtgcaacgttatctaaagagcggataactgaggaagcacaaagattcttggaaatggtttatggggaagagtgagtggttaggctagctacatttaatgacaatgtgcaggttgtacatattggtcatttattccgtaactcgggtcataaggagtggcgtatttttgtttggtttaatccaatgcaagaacggaaatggactcgatttactcatttgcctttattaagtcgagctaaggtggttaacagtacaacaaagcaaataaataaggcggatcgtgtgattgagtttgaagcatcggatcttcaacgagccaaaataatcgattttcctaatctctcgtcctttgcttccgtacgcaacaaggatggagcgcagagttcatttatttacgaagctgaaacaccatatagcaagactcgttatcacatcccacagttagagctagctcggtcattatttttaggggatcctctagagtcgacctgcaggcatgcaagcttggctgttttggcggatgagagaagattttcagcctgatacagattaaatcagaacgcagaagcggtctgataaaacagaatttgcctggcggcagtagcgcggtggtcccacctgaccccatgccgaactcagaagtgaaacgccgtagcgccgatggtagtgtggggtctccccatgcgagagtagggaactgccaggcatcaaataaaacgaaaggctcagtcgaaagactgggcctttcgttttatctgttgtttgtcggtgaacgctctcctgagtaggacaaatccgccgggagcggatttgaacgttgcgaagcaacggcccggagggtggcgggcaggacgcccgccataaactgccaggcatcaaattaagcagaaggccatcctgacggatggcctttttgcgtttctacaaactcttttgtttatttttctaaatacattcaaatatgtatccgctcatgagacaataaccctgataaatgcttcaataatattgaaaaaggaagagtatgagtattcaacatttccgtgtcgcccttattcccttttttgcggcattttgccttcctgtttttgctcacccagaaacgctggtgaaagtaaaagatgctgaagatcagttgggtgcacgagtgggttacatcgaactggatctcaacagcggtaagatccttgagagttttcgccccgaagaacgttttccaatgatgagcacttttaaagttctgctatgtggcgcggtattatcccgtgttgacgccgggcaagagcaactcggtcgccgcatacactattctcagaatgacttggttgagtactcaccagtcacagaaaagcatcttacggatggcatgacagtaagagaattatgcagtgctgccataaccatgagtgataacactgcggccaacttacttctgacaacgatcggaggaccgaaggagctaaccgcttttttgcacaacatgggggatcatgtaactcgccttgatcgttgggaaccggagctgaatgaagccataccaaacgacgagcgtgacaccacgatgcctgcagcaatggcaacaacgttgcgcaaactattaactggcgaactacttactctagcttcccggcaacaattaatagactggatggaggcggataaagttgcaggaccacttctgcgctcggcccttccggctggctggtttattgctgataaatctggagccggtgagcgtgggtctcgcggtatcattgcagcactggggccagatggtaagccctcccgtatcgtagttatctacacgacggggagtcaggcaactatggatgaacgaaatagacagatcgctgagataggtgcctcactgattaagcattggtaactgtcagaccaagtttactcatatatactttagattgatttacgcgccctgtagcggcgcattaagcgcggcgggtgtggtggttacgcgcagcgtgaccgctacacttgccagcgccctagcgcccgctcctttcgctttcttcccttcctttctcgccacgttcgccgccggccagcctcgcagagcaggattcccgttgagcaccgccaggtgcgaataagggacagtgaagaaggaacacccgctcgcgggtgggcctacttcacctatcctgcccggcggcatcaccggcgccacaggtgcggttgctggcgcctatatcgccgacatcaccgatggggaagatcgggctcgccacttcgggctcatgagcgcttgtttcggcgtgggtatggtggcaggccccgtggccgggggactgttgggcgccatctccttgcatgcaccattccttgcggcggcggtgctcaacggcctcaacctactactgggctgcttcctaatgcaggagtcgcataagggagagcgtcgatccccgacagtaagacgggtaagcctgttgatgataccgctgccttactgggtgcattagccagtctgaatgacctgtcacgggataatccgaagtggtcagactggaaaatcagagggcaggaactgctgaacagcaaaaagtcagatagcaccacatagcagacccgccataaaacgccctgagaagcccgtgacgggcttttcttgtattatgggtagtttccttgcatgaatccataaaaggcgcctgtagtgccatttacccccattcactgccagagccgtgagcgcagcgaactgaatgtcacgaaaaagacagcgactcaggtgcctgatggtcggagacaaaaggaatattcagcgatttgcccgagcttgcgagggtgctacttaagcctttagggttttaaggtctgttttgtagaggagcaaacagcgtttgcgacatccttttgtaatactgcggaactgactaaagtagtgagttatacacagggctgggatctattctttttatctttttttattctttctttattctataaattataaccacttgaatataaacaaaaaaaacacacaaaggtctagcggaatttacagagggtctagcagaatttacaagttttccagcaaaggtctagcagaatttacagatacccacaactcaaaggaaaaggactagtaattatcattgactagcccatctcaattggtatagtgattaaaatcacctagaccaattgagatgtatgtctgaattagttgttttcaaagcaaatgaactagcgattagtcgctatgacttaacggagcatgaaaccaagctaattttatgctgtgtggcactactcaaccccacgattgaaaaccctacaaggaaagaacggacggtatcgttcacttataaccaatacgttcagatgatgaacatcagtagggaaaatgcttatggtgtattagctaaagcaaccagagagctgatgacgagaactgtggaaatcaggaatcctttggttaaaggctttgagattttccagtggacaaactatgccaagttctcaagcgaaaaattagaattagtttttagtgaagagatattgccttatcttttccagttaaaaaaattcataaaatataatctggaacatgttaagtcttttgaaaacaaatactctatgaggatttatgagtggttattaaaagaactaacacaaaagaaaactcacaaggcaaatatagagattagccttgatgaatttaagttcatgttaatgcttgaaaataactaccatgagtttaaaaggcttaaccaatgggttttgaaaccaataagtaaagatttaaacacttacagcaatatgaaattggtggttgataagcgaggccgcccgactgatacgttgattttccaagttgaactagatagacaaatggatctcgtaaccgaacttgagaacaaccagataaaaatgaatggtgacaaaataccaacaaccattacatcagattcctacctacataacggactaagaaaaacactacacgatgctttaactgcaaaaattcagctcaccagttttgaggcaaaatttttgagtgacatgcaaagtaagtatgatctcaatggttcgttctcatggctcacgcaaaaacaacgaaccacactagagaacatactggctaaatacggaaggatctgaggttcttatggctcttgtatctatcagtgaagcatcaagactaacaaacaaaagtagaacaactgttcaccgttacatatcaaagggaaaactgtccatatgcacagatgaaaacggtgtaaaaaagatagatacatcagagcttttacgagtttttggtgcatttaaagctgttcaccatgaacagatcgacaatgtaacagatgaacagcatgtaacacctaatagaacaggtgaaaccagtaaaacaaagcaactagaacatgaaattgaacacctgagacaacttgttacagctcaacagtcacacatagacagcctgaaacaggcgatgctgcttatcgaatcaaagctgccgacaacacgggagccagtgacgcctcccgtggggaaaaaatcatggcaattctggaagaaatagcgctttcagcctgtgggcggacaaaatagttgggaactgggaggggtggaaatggagtttttaaggattatttagggaagagtgacaaaatagatgggaactgggtgtagcgtcgtaagctaatacgaaaattaaaaatgacaaaatagtttggaactagatttcacttatctggttggtcgacactagtattaccctgttatccctagatttaaatgatatcggatcctagtaagccacgttttaatcgttagttagttatcttcaagagaaaatgtaatcacactggctcaccttcgggtgggcctttctgcgtttataaggagacactttgaattcgagctcaggcgcgccagcggccgcgtttaaacgctgagggaaagttcgaatccgacgtccctcctgtgtgaaattgttatggcgactcgagttcgaatgtctcctcagccctgcaggaagctttacgaccagtctaaaaagcgcctgaattcgcgaccttctcgt

SEQ ID NO: 5556 - DNA, 14555 bp, Artificial Sequence
  Description of Artificial Sequence: Synthetic polynucleotide
ccattaggtacgcatttgctactaagtgagcgtatttcggtcatgattcgaggtggctacgtaggcagaaatcctaaaacaggagatttacaaaagcatttacaaaatggttatgagcgtgttcaaacgggagagttggagacatttcgctttgaggaggcacgatctacggcacaaagcttattgttaattggttgttctggtagtgggaagacgacctctcttcatcgtattctagccacgtatcctcaggtgatttaccatcgtgaactcaatgtagagcaggtggtgtatttgaaaatagactgctcgcataatggttcgctaaaagaaatctgcttgaattttttcagagcgttggatcgagccttgggctcgaactatgagcgtcgttatggcttaaaacgtcatggtatagaaaccatgttggctttgatgtcgcaaatagccaatgcacatgctttagggttgttggttattgatgaaattcagcatttaagccgctctcgttcgggtggatctcaagagatgctgaacttttttgtgacgatggtgaatattattggcgtaccagtgatgttgattggtacccctaaagcacgagagatttttgaggctgatttgcggtctgcacgtagaggggcagggtttggagctatattctgggatcctatacaacaaacgcaacgtggaaagcccaatcaagagtggatcgcttttacggataatctttggcaattacagcttttacaacgcaaagatgcgctgttatcggatgaggtccgtgatgtgtggtatgagctaagccaaggagtgatggacattgtagtaaaactttttgtactcgctcagctccgtgcgctagctttaggcaatgagcgtattaccgctggtttattgcggcaagtgtatcaagatgagttaaagcctgtgcaccccatgctagaggcattacgctcgggtatcccagaacgcattgctcgttattctgatctagtcgttcccgagattgataaacggttaatccaacttcagctagatatcgcagcgatacaagaacaaacaccagaagaaaaagcccttcaagagttagataccgaagatcagcgtcatttatatctgatgctgaaagaggattacgattcaagcctgttaattcccactattaaaaaagcgtttagccagaatccaacgatgacaagacaaaagttactgcctcttgttttgcagtggttgatggaaggcgaaacggtagtgtcagaactagaaaagccctccaagagtaaaaaggtttcggctataaaggtagtcaagcccagcgactgggatagcttgcctgatacggatttacgttatatctattcacaacgccaacctgaaaaaaccatgcatgaacggttaaaagggaaaggggtaatagtggatatggcgagcttatttaaacaagcaggttagccatgagaaactttcctgttccgtactcgaatgagctgatttatagcactattgcacgggcaggcgtttatcaagggattgttagtcctaagcagctgttggatgaggtgtatggcaaccgcaaggtggtcgctaccttaggtctgccctcgcatttaggtgtgatagcaagacatctacatcaaacaggacgttacgctgttcagcagcttatttatgagcataccttattccctttatatgctccgtttgtaggcaaggagcgccgagacgaagctattcggttaatggagtaccaagcgcaaggtgcggtgcatttaatgctaggagtcgctgcttctagagttaagagcgataaccgctttagatactgccctgattgcgttgctcttcagctaaataggtatggggaagccttttggcaacgagattggtatttgcccgctttgccatattgtccaaaacacggtgctttagtcttctttgatagagctgtagatgatcaccgacatcaattttgggctttgggtcatactgagctgctttcagactaccccaaagactccctatctcaattaacagcactagctgcttatatagcccctctgttagatgctccacgagcgcaagagctttccccaagccttgagcagtggacgctgttttatcagcgcttagcgcaggatctagggctaaccaaaagcaagcacattcgtcatgacttggtggcggagagagtgaggcagacttttagtgatgaggcactagagaaactggatttaaagttggcagagaacaaggacacgtgttggctgaaaagtatattccgtaagcatagaaaagcctttagttatttacagcatagtattgtgtggcaagccttattgccaaaactaacggttatagaagcgctacagcaggcaagtgctcttactgagcactctataacgacaagacctgttagccagtctgtgcaacctaactctgaagatttatctgttaagcataaagactggcagcaactagtgcataaataccaaggaattaaggcggcaagacagtctttagagggtggggtgctatacgcttggctttaccgacatgacagggattggctagttcactggaatcaacagcatcaacaagagcgtctggcacccgcccctagagttgattggaaccaaagagatcgaattgctgtacgacaactattaagaatcataaagcgtctagatagtagccttgatcacccaagagcgacatcgagctggctgttaaagcaaactcctaacggaacctctcttgcaaaaaatctacagaaactgcctttggtagcgctttgcttaaagcgttactcagagagtgtggaagattatcaaattagacggattagccaagcttttattaagcttaaacaggaagatgttgagcttaggcgctggcgattattaagaagtgcaacgttatctaaagagcggataactgaggaagcacaaagattcttggaaatggtttatggggaagagtgagtggttaggctagctacatttaatgacaatgtgcaggttgtacatattggtcatttattccgtaactcgggtcataaggagtggcgtatttttgtttggtttaatccaatgcaagaacggaaatggactcgatttactcatttgcctttattaagtcgagctaaggtggttaacagtacaacaaagcaaataaataaggcggatcgtgtgattgagtttgaagcatcggatcttcaacgagccaaaataatcgattttcctaatctctcgtcctttgcttccgtacgcaacaaggatggagcgcagagttcatttatttacgaagctgaaacaccatatagcaagactcgttatcacatcccacagttagagctagctcggtcattatttttaggggatcctctagagtcgacctgcaggcatgcaagcttggctgttttggcggatgagagaagattttcagcctgatacagattaaatcagaacgcagaagcggtctgataaaacagaatttgcctggcggcagtagcgcggtggtcccacctgaccccatgccgaactcagaagtgaaacgccgtagcgccgatggtagtgtggggtctccccatgcgagagtagggaactgccaggcatcaaataaaacgaaaggctcagtcgaaagactgggcctttcgttttatctgttgtttgtcggtgaacgctctcctgagtaggacaaatccgccgggagcggatttgaacgttgcgaagcaacggcccggagggtggcgggcaggacgcccgccataaactgccaggcatcaaattaagcagaaggccatcctgacggatggcctttttgcgtttctacaaactcttttgtttatttttctaaatacattcaaatatgtatccgctcatgagacaataaccctgataaatgcttcaataatattgaaaaaggaagagtatgagtattcaacatttccgtgtcgcccttattcccttttttgcggcattttgccttcctgtttttgctcacccagaaacgctggtgaaagtaaaagatgctgaagatcagttgggtgcacgagtgggttacatcgaactggatctcaacagcggtaagatccttgagagttttcgccccgaagaacgttttccaatgatgagcacttttaaagttctgctatgtggcgcggtattatcccgtgttgacgccgggcaagagcaactcggtcgccgcatacactattctcagaatgacttggttgagtactcaccagtcacagaaaagcatcttacggatggcatgacagtaagagaattatgcagtgctgccataaccatgagtgataacactgcggccaacttacttctgacaacgatcggaggaccgaaggagctaaccgcttttttgcacaacatgggggatcatgtaactcgccttgatcgttgggaaccggagctgaatgaagccataccaaacgacgagcgtgacaccacgatgcctgcagcaatggcaacaacgttgcgcaaactattaactggcgaactacttactctagcttcccggcaacaattaatagactggatggaggcggataaagttgcaggaccacttctgcgctcggcccttccggctggctggtttattgctgataaatctggagccggtgagcgtgggtctcgcggtatcattgcagcactggggccagatggtaagccctcccgtatcgtagttatctacacgacggggagtcaggcaactatggatgaacgaaatagacagatcgctgagataggtgcctcactgattaagcattggtaactgtcagaccaagtttactcatatatactttagattgatttacgcgccctgtagcggcgcattaagcgcggcgggtgtggtggttacgcgcagcgtgaccgctacacttgccagcgccctagcgcccgctcctttcgctttcttcccttcctttctcgccacgttcgccgccggccagcctcgcagagcaggattcccgttgagcaccgccaggtgcgaataagggacagtgaagaaggaacacccgctcgcgggtgggcctacttcacctatcctgcccggcggcatcaccggcgccacaggtgcggttgctggcgcctatatcgccgacatcaccgatggggaagatcgggctcgccacttcgggctcatgagcgcttgtttcggcgtgggtatggtggcaggccccgtggccgggggactgttgggcgccatctccttgcatgcaccattccttgcggcggcggtgctcaacggcctcaacctactactgggctgcttcctaatgcaggagtcgcataagggagagcgtcgatccccgacagtaagacgggtaagcctgttgatgataccgctgccttactgggtgcattagccagtctgaatgacctgtcacgggataatccgaagtggtcagactggaaaatcagagggcaggaactgctgaacagcaaaaagtcagatagcaccacatagcagacccgccataaaacgccctgagaagcccgtgacgggcttttcttgtattatgggtagtttccttgcatgaatccataaaaggcgcctgtagtgccatttacccccattcactgccagagccgtgagcgcagcgaactgaatgtcacgaaaaagacagcgactcaggtgcctgatggtcggagacaaaaggaatattcagcgatttgcccgagcttgcgagggtgctacttaagcctttagggttttaaggtctgttttgtagaggagcaaacagcgtttgcgacatccttttgtaatactgcggaactgactaaagtagtgagttatacacagggctgggatctattctttttatctttttttattctttctttattctataaattataaccacttgaatataaacaaaaaaaacacacaaaggtctagcggaatttacagagggtctagcagaatttacaagttttccagcaaaggtctagcagaatttacagatacccacaactcaaaggaaaaggactagtaattatcattgactagcccatctcaattggtatagtgattaaaatcacctagaccaattgagatgtatgtctgaattagttgttttcaaagcaaatgaactagcgattagtcgctatgacttaacggagcatgaaaccaagctaattttatgctgtgtggcactactcaaccccacgattgaaaaccctacaaggaaagaacggacggtatcgttcacttataaccaatacgttcagatgatgaacatcagtagggaaaatgcttatggtgtattagctaaagcaaccagagagctgatgacgagaactgtggaaatcaggaatcctttggttaaaggctttgagattttccagtggacaaactatgccaagttctcaagcgaaaaattagaattagtttttagtgaagagatattgccttatcttttccagttaaaaaaattcataaaatataatctggaacatgttaagtcttttgaaaacaaatactctatgaggatttatgagtggttattaaaagaactaacacaaaagaaaactcacaaggcaaatatagagattagccttgatgaatttaagttcatgttaatgcttgaaaataactaccatgagtttaaaaggcttaaccaatgggttttgaaaccaataagtaaagatttaaacacttacagcaatatgaaattggtggttgataagcgaggccgcccgactgatacgttgattttccaagttgaactagatagacaaatggatctcgtaaccgaacttgagaacaaccagataaaaatgaatggtgacaaaataccaacaaccattacatcagattcctacctacataacggactaagaaaaacactacacgatgctttaactgcaaaaattcagctcaccagttttgaggcaaaatttttgagtgacatgcaaagtaagtatgatctcaatggttcgttctcatggctcacgcaaaaacaacgaaccacactagagaacatactggctaaatacggaaggatctgaggttcttatggctcttgtatctatcagtgaagcatcaagactaacaaacaaaagtagaacaactgttcaccgttacatatcaaagggaaaactgtccatatgcacagatgaaaacggtgtaaaaaagatagatacatcagagcttttacgagtttttggtgcatttaaagctgttcaccatgaacagatcgacaatgtaacagatgaacagcatgtaacacctaatagaacaggtgaaaccagtaaaacaaagcaactagaacatgaaattgaacacctgagacaacttgttacagctcaacagtcacacatagacagcctgaaacaggcgatgctgcttatcgaatcaaagctgccgacaacacgggagccagtgacgcctcccgtggggaaaaaatcatggcaattctggaagaaatagcgctttcagcctgtgggcggacaaaatagttgggaactgggaggggtggaaatggagtttttaaggattatttagggaagagtgacaaaatagatgggaactgggtgtagcgtcgtaagctaatacgaaaattaaaaatgacaaaatagtttggaactagatttcacttatctggttggtcgacactagtattaccctgttatccctagatttaaatgatatcggatcctagtaagccacgttttaatcgttagttagttatcttcaagagaaaatgtaatcacactggctcaccttcgggtgggcctttctgcgtttataaggagacactttgaattcgagctcaggcgcgccagcggccgcacattcactgaactttgacgtaccggcacatgtcgtctaaaccataagttgacatatctaaagcataagttgacatgatcttgcatcataagctgacatagcctaaacctgtagtaaagtaacaacaggttggtggtgtgtttttaaatgatatcggatcctagtaagccacgttgtgtctcaaaatctctgatgttacattgcacaagataaaaatatatcatcatgaacaataaaactgtctgcttacataaacagtaatacaaggggtgttatgagccatattcaacgggaaacgtcttgctcgaggccgcgattaaattccaacatggatgctgatttatatgggtataaatgggctcgcgataatgtcgggcaatcaggtgcgacaatctatcgattgtatgggaagcccgatgcgccagagttgtttctgaaacatggcaaaggtagcgttgccaatgatgttacagatgagatggtcagactaaactggctgacggaatttatgcctcttccgaccatcaagcattttatccgtactcctgatgatgcatggttactcaccactgcgatccccgggaaaacagcattccaggtattagaagaatatcctgattcaggtgaaaatattgttgatgcgctggcagtgttcctgcgccggttgcattcgattcctgtttgtaattgtccttttaacagcgatcgcgtatttcgtctcgctcaggcgcaatcacgaatgaataacggtttggttgatgcgagtgattttgatgacgagcgtaatggctggcctgttgaacaagtctggaaagaaatgcataagcttttgccattctcaccggattcagtcgtcactcatggtgatttctcacttgataaccttatttttgacgaggggaaattaataggttgtattgatgttggacgagtcggaatcgcagaccgataccaggatcttgccatcctatggaactgcctcggtgagttttctccttcattacagaaacggctttttcaaaaatatggtattgataatcctgatatgaataaattgcagtttcatttgatgctcgatgagtttttctaatcagaattggttaattggttgtaacactggcagagcattacgctgacttgacgggacggcggctttgttgaataaatgatgcagttaagtgcctgctgtgtatctcgaacagattgctgaagtggtaaaataacaacaccgcaggggcagggcgtaggggttgatgtcactctatgtcagcttatgggtaatttttatgtcaacttatgggttataaaacactcgtaagtcactgatttatggttgtgcgttatgtcaacttatggtttagacgacagcacaacctcacccagtccttcttcggggggcggccgcgtttaaacgctgagggaaagttcgaatccgacgtccctcctgtgtgaaattgttatggcgactcgagttcgaatgtctcctcagccctgcaggaagctttacgaccagtctaaaaagcgcctgaattcgcgaccttctcgttactgacaggaaaatgggccattggcaaccagggaaagatgaacgtgatgatgttcacaatttgctgaattgtggtgatgtgatgctcaccgcatttccttaattaacgccggatggtagtgtggggtctccccatgcgagagtagggaactgccaggcatcaaataaaacgaaaggctcagtcgaaagactgggcctttcgttttatctgttgtttgtcggtgaacgctctcctgagtaggacaaatccgccgggagcggatttgaacgttgcgaagcaacggcccggagggtggcgggcaggacgcccgccataaactgccaggcatcaaattaagcagaaggccatcctgacggatggcctttttgcgtttagttagttatctcctaggacgcgccacggccgcgtcgaccccacgcccctctttaatacgacgggcaatttgcacttcagaaaatgaagagtttgctttagccataacaaaagtccagtatgctttttcacagcataactggactgatttcagtttacaactattctgtctagtttaagactttattgtcatagtttagatctattttgttcagtttaagactttattgtccgcccacaggccacgatgcgtccggcgtagaggatctgctcatgtttgacagcttatcatcgatgcataatgtgcctgtcaaatggacgaagcagggattctgcaaaccctatgctactccgtcaagccgtcaattgtctgattcgttaccaattatgacaacttgacggctacatcattcactttttcttcacaaccggcacggaactcgctcgggctggccccggtgcattttttaaatacccgcgagaaatagagttgatcgtcaaaaccaacattgcgaccgacggtggcgataggcatccgggtggtgctcaaaagcagcttcgcctggctgatacgttggtcctcgcgccagcttaagacgctaatccctaactgctggcggaaaagatgtgacagacgcgacggcgacaagcaaacatgctgtgcgacgctggcgatatcaaaattgctgtctgccaggtgatcgctgatgtactgacaagcctcgcgtacccgattatccatcggtggatggagcgactcgttaatcgcttccatgcgccgcagtaacaattgctcaagcagatttatcgccagcagctccgaatagcgcccttccccttgcccggcgttaatgatttgcccaaacaggtcgctgaaatgcggctggtgcgcttcatccgggcgaaagaaccccgtattggcaaatattgacggccagttaagccattcatgccagtaggcgcgcggacgaaagtaaacccactggtgataccattcgcgagcctccggatgacgaccgtagtgatgaatctctcctggcgggaacagcaaaatatcacccggtcggcaaacaaattctcgtccctgatttttcaccaccccctgaccgcgaatggtgagattgagaatataacctttcattcccagcggtcggtcgataaaaaaatcgagataaccgttggcctcaatcggcgttaaacccgccaccagatgggcattaaacgagtatcccggcagcaggggatcattttgcgcttcagccatacttttcatactcccgccattcagagaagaaaccaattgtccatattgcatcagacattgccgtcactgcgtcttttactggctcttctcgctaaccaaaccggtaaccccgcttattaaaagcattctgtaacaaagcgggaccaaagccatgacaaaaacgcgtaacaaaagtgtctataatcacggcagaaaagtccacattgattatttgcacggcgtcacactttgctatgccatagcatttttatccataagattagcggatcctacctgacgctttttatcgcaactctctactgtttctccatacccgtttttttgggctagcgaattcgagctcggtacccaagtcttaaactagacagaatagttgtaaactgaaatcagtccagttatgctgtgaaaaagcatactggacttttgttatggctaaagcaaactcttcattttctgaagtgcaaattgcccgtcgtattaaagaggggcgtggccaagggcatggtaaagactatattccatggctaacagtacaagaagttccttcttcaggtcgttcccaccgtatttattctcataagacgggacgagtccatcatttgctatctgacttagagcttgctgtttttctcagtcttgagtgggagagcagcgtgctagatatacgcgagcagttccccttattacctagtgataccaggcagattgcaatagatagtggtattaagcatcctgttattcgtggtgtagatcaggttatgtctactgattttttagtggactgcaaagatggtccttttgagcagtttgctattcaagtcaaacctgcagcagccttacaagacgagcgtaccttagaaaaactagaactagagcgtcgctattggcagcaaaagcaaattccttggttcatttttactgataaagaaataaatcccgtagtaaaagaaaatattgaatggctttattcagtgaaaacagaagaagtttctgcggagcttttagcacaactatccccattggcccatatcctgcaagaaaaaggagatgaaaacattatcaatgtctgtaagcaggttgatattgcttatgatttggagttaggcaaaacattgagtgagatacgagccttaaccgcaaatggttttattaagttcaatatttataagtctttcagggcaaataagtgtgcagatctctgtattagccaagtagtgaatatggaggagttgcgctatgtggcaaattaatgaggttgtgctatttgataatgatccgtatcgcattttggctatagaggatggccaagttgtctggatgcaaataagcgctgataaaggagttccacaagctagggctgagttgttgctaatgcagtatttagatgaaggccgcttagttagaactgatgacccttatgtacatcttgatttagaagagccgtctgtagattctgtcagcttccagaagcgcgaggaggattatcgaaaaattcttcctattattaatagtaaggatcgtttcgaccctaaagtcagaagcgaactcgttgagcatgtggtccaagaacataaggttactaaggctacagtttataagttgttacgccgttactggcagcgtggtcaaacgcctaatgcattaattcctgactacaaaaacagcggtgcaccaggggaaagacgttcagcgacaggaacagcaaagattggccgagccagagaatatggtaagggtgaaggaaccaaggtaacgcccgagattgaacgcctttttaggttgaccatagaaaagcacctgttaaatcaaaaaggtacaaagaccaccgttgcctatagacgatttgtggacttgtttgctcagtattttcctcgcattccccaagaggattacccaacactacgtcagtttcgttatttttatgatcgagaataccctaaagctcagcgcttaaagtctagagttaaagcaggggtatataaaaaagacgtacgacccttaagtagtacagccacttctcaggcgttaggccctgggagtcgttatgagattgatgccacgattgctgatatttatttagtggatcatcatgatcgccaaaaaatcataggaagaccaacgctttacattgtgattgatgtgtttagtcggatgatcacgggcttttatatcggctttgaaaatccgtcttatgtggtggcgatgcaggcttttgtaaatgcttgctctgacaaaacggccatttgtgcccagcatgatattgagattagtagctcagactggccgtgtgtaggtttgccagatgtgttgctagcggaccgtggcgaattaatgagtcatcaggtcgaagccttagtttctagttttaatgtgcgagtggaaagtgctccacctagacgtggcgatgctaaaggcatagtggaaagcacttttagaacactacaagccgagtttaagtcctttgcacctggcattgtagagggcagtcggatcaaaagccatggtgaaacagactataggttagatgcatctctgtcggtatttgagttcacacaaattattttgcgtacgatcttattcagaaataaccatctggtgatggataaatacgatcgagatgctgattttcctacagatttaccgtctattcctgtccagctatggcaatggggtatgcagcatcgtacaggtagtttaagggctgtggagcaagagcagttgcgagtagcgttactgcctcgccgaaaggtctctatttcttcatttggcgttaatttgtggggtttgtattactcggggtcagagattctgcgtgagggttggttgcagcggagcactgatatagctagacctcaacatttagaagcggcttatgacccagtgctggttgatacgatttatttgtttccgcaagttggcagccgtgtattttggcgctgtaatctgacggaacgtagtcggcagtttaaaggtctctcattttgggaggtttgggatatacaagcacaagaaaaacacaataaagccaatgcgaagcaggatgagttaactaaacgcagggagcttgaggcgtttattcagcaaaccattcagaaagcgaataagttaacgcccagtactactgagcccaaatcaacacgcattaagcagattaaaactaataaaaaagaagccgtgacctcggagcgtaaaaaacgtgcggagcatttgaagccaagctcttcaggtgatgaggctaaagttattcctttcaacgcagtggaagcggatgatcaagaagattacagcctacccacatacgtgcctgaattatttcaggatccaccagaaaaggatgagtcatgagtgctacccggattcaagcagtttatcgtgatacgggggtagaggcttatcgtgataatccttttatcgaggccttaccaccattacaagagtcagtgaatagtgctgcatcactgaaatcctctttacagcttacttcctctgacttgcaaaagtcccgtgttatcagagctcataccatttgtcgtattccagatgactattttcag

SEQ ID NO: 5557 - DNA, 14453 bp, Artificial Sequence
  Description of Artificial Sequence: Synthetic polynucleotide
ggccacgatgcgtccggcgtagaggatctgctcatgtttgacagcttatcatcgatgcataatgtgcctgtcaaatggacgaagcagggattctgcaaaccctatgctactccgtcaagccgtcaattgtctgattcgttaccaattatgacaacttgacggctacatcattcactttttcttcacaaccggcacggaactcgctcgggctggccccggtgcattttttaaatacccgcgagaaatagagttgatcgtcaaaaccaacattgcgaccgacggtggcgataggcatccgggtggtgctcaaaagcagcttcgcctggctgatacgttggtcctcgcgccagcttaagacgctaatccctaactgctggcggaaaagatgtgacagacgcgacggcgacaagcaaacatgctgtgcgacgctggcgatatcaaaattgctgtctgccaggtgatcgctgatgtactgacaagcctcgcgtacccgattatccatcggtggatggagcgactcgttaatcgcttccatgcgccgcagtaacaattgctcaagcagatttatcgccagcagctccgaatagcgcccttccccttgcccggcgttaatgatttgcccaaacaggtcgctgaaatgcggctggtgcgcttcatccgggcgaaagaaccccgtattggcaaatattgacggccagttaagccattcatgccagtaggcgcgcggacgaaagtaaacccactggtgataccattcgcgagcctccggatgacgaccgtagtgatgaatctctcctggcgggaacagcaaaatatcacccggtcggcaaacaaattctcgtccctgatttttcaccaccccctgaccgcgaatggtgagattgagaatataacctttcattcccagcggtcggtcgataaaaaaatcgagataaccgttggcctcaatcggcgttaaacccgccaccagatgggcattaaacgagtatcccggcagcaggggatcattttgcgcttcagccatacttttcatactcccgccattcagagaagaaaccaattgtccatattgcatcagacattgccgtcactgcgtcttttactggctcttctcgctaaccaaaccggtaaccccgcttattaaaagcattctgtaacaaagcgggaccaaagccatgacaaaaacgcgtaacaaaagtgtctataatcacggcagaaaagtccacattgattatttgcacggcgtcacactttgctatgccatagcatttttatccataagattagcggatcctacctgacgctttttatcgcaactctctactgtttctccatacccgtttttttgggctagcgaattcgagctcggtacccaagtcttaaactagacagaatagttgtaaactgaaatcagtccagttatgctgtgaaaaagcatactggacttttgttatggctaaagcaaactcttcattttctgaagtgcaaattgcccgtcgtattaaagaggggcgtggccaagggcatggtaaagactatattccatggctaacagtacaagaagttccttcttcaggtcgttcccaccgtatttattctcataagacgggacgagtccatcatttgctatctgacttagagcttgctgtttttctcagtcttgagtgggagagcagcgtgctagatatacgcgagcagttccccttattacctagtgataccaggcagattgcaatagatagtggtattaagcatcctgttattcgtggtgtagatcaggttatgtctactgattttttagtggactgcaaagatggtccttttgagcagtttgctattcaagtcaaacctgcagcagccttacaagacgagcgtaccttagaaaaactagaactagagcgtcgctattggcagcaaaagcaaattccttggttcatttttactgataaagaaataaatcccgtagtaaaagaaaatattgaatggctttattcagtgaaaacagaagaagtttctgcggagcttttagcacaactatccccattggcccatatcctgcaagaaaaaggagatgaaaacattatcaatgtctgtaagcaggttgatattgcttatgatttggagttaggcaaaacattgagtgagatacgagccttaaccgcaaatggttttattaagttcaatatttataagtctttcagggcaaataagtgtgcagatctctgtattagccaagtagtgaatatggaggagttgcgctatgtggcaaattaatgaggttgtgctatttgataatgatccgtatcgcattttggctatagaggatggccaagttgtctggatgcaaataagcgctgataaaggagttccacaagctagggctgagttgttgctaatgcagtatttagatgaaggccgcttagttagaactgatgacccttatgtacatcttgatttagaagagccgtctgtagattctgtcagcttccagaagcgcgaggaggattatcgaaaaattcttcctattattaatagtaaggatcgtttcgaccctaaagtcagaagcgaactcgttgagcatgtggtccaagaacataaggttactaaggctacagtttataagttgttacgccgttactggcagcgtggtcaaacgcctaatgcattaattcctgactacaaaaacagcggtgcaccaggggaaagacgttcagcgacaggaacagcaaagattggccgagccagagaatatggtaagggtgaaggaaccaaggtaacgcccgagattgaacgcctttttaggttgaccatagaaaagcacctgttaaatcaaaaaggtacaaagaccaccgttgcctatagacgatttgtggacttgtttgctcagtattttcctcgcattccccaagaggattacccaacactacgtcagtttcgttatttttatgatcgagaataccctaaagctcagcgcttaaagtctagagttaaagcaggggtatataaaaaagacgtacgacccttaagtagtacagccacttctcaggcgttaggccctgggagtcgttatgagattgatgccacgattgctgatatttatttagtggatcatcatgatcgccaaaaaatcataggaagaccaacgctttacattgtgattgatgtgtttagtcggatgatcacgggcttttatatcggctttgaaaatccgtcttatgtggtggcgatgcaggcttttgtaaatgcttgctctgacaaaacggccatttgtgcccagcatgatattgagattagtagctcagactggccgtgtgtaggtttgccagatgtgttgctagcggaccgtggcgaattaatgagtcatcaggtcgaagccttagtttctagttttaatgtgcgagtggaaagtgctccacctagacgtggcgatgctaaaggcatagtggaaagcacttttagaacactacaagccgagtttaagtcctttgcacctggcattgtagagggcagtcggatcaaaagccatggtgaaacagactataggttagatgcatctctgtcggtatttgagttcacacaaattattttgcgtacgatcttattcagaaataaccatctggtgatggataaatacgatcgagatgctgattttcctacagatttaccgtctattcctgtccagctatggcaatggggtatgcagcatcgtacaggtagtttaagggctgtggagcaagagcagttgcgagtagcgttactgcctcgccgaaaggtctctatttcttcatttggcgttaatttgtggggtttgtattactcggggtcagagattctgcgtgagggttggttgcagcggagcactgatatagctagacctcaacatttagaagcggcttatgacccagtgctggttgatacgatttatttgtttccgcaagttggcagccgtgtattttggcgctgtaatctgacggaacgtagtcggcagtttaaaggtctctcattttgggaggtttgggatatacaagcacaagaaaaacacaataaagccaatgcgaagcaggatgagttaactaaacgcagggagcttgaggcgtttattcagcaaaccattcagaaagcgaataagttaacgcccagtactactgagcccaaatcaacacgcattaagcagattaaaactaataaaaaagaagccgtgacctcggagcgtaaaaaacgtgcggagcatttgaagccaagctcttcaggtgatgaggctaaagttattcctttcaacgcagtggaagcggatgatcaagaagattacagcctacccacatacgtgcctgaattatttcaggatccaccagaaaaggatgagtcatgagtgctacccggattcaagcagtttatcgtgatacgggggtagaggcttatcgtgataatccttttatcgaggccttaccaccattacaagagtcagtgaatagtgctgcatcactgaaatcctctttacagcttacttcctctgacttgcaaaagtcccgtgttatcagagctcataccatttgtcgtattccagatgactattttcagccattaggtacgcatttgctactaagtgagcgtatttcggtcatgattcgaggtggctacgtaggcagaaatcctaaaacaggagatttacaaaagcatttacaaaatggttatgagcgtgttcaaacgggagagttggagacatttcgctttgaggaggcacgatctacggcacaaagcttattgttaattggttgttctggtagtgggaagacgacctctcttcatcgtattctagccacgtatcctcaggtgatttaccatcgtgaactcaatgtagagcaggtggtgtatttgaaaatagactgctcgcataatggttcgctaaaagaaatctgcttgaattttttcagagcgttggatcgagccttgggctcgaactatgagcgtcgttatggcttaaaacgtcatggtatagaaaccatgttggctttgatgtcgcaaatagccaatgcacatgctttagggttgttggttattgatgaaattcagcatttaagccgctctcgttcgggtggatctcaagagatgctgaacttttttgtgacgatggtgaatattattggcgtaccagtgatgttgattggtacccctaaagcacgagagatttttgaggctgatttgcggtctgcacgtagaggggcagggtttggagctatattctgggatcctatacaacaaacgcaacgtggaaagcccaatcaagagtggatcgcttttacggataatctttggcaattacagcttttacaacgcaaagatgcgctgttatcggatgaggtccgtgatgtgtggtatgagctaagccaaggagtgatggacattgtagtaaaactttttgtactcgctcagctccgtgcgctagctttaggcaatgagcgtattaccgctggtttattgcggcaagtgtatcaagatgagttaaagcctgtgcaccccatgctagaggcattacgctcgggtatcccagaacgcattgctcgttattctgatctagtcgttcccgagattgataaacggttaatccaacttcagctagatatcgcagcgatacaagaacaaacaccagaagaaaaagcccttcaagagttagataccgaagatcagcgtcatttatatctgatgctgaaagaggattacgattcaagcctgttaattcccactattaaaaaagcgtttagccagaatccaacgatgacaagacaaaagttactgcctcttgttttgcagtggttgatggaaggcgaaacggtagtgtcagaactagaaaagccctccaagagtaaaaaggtttcggctataaaggtagtcaagcccagcgactgggatagcttgcctgatacggatttacgttatatctattcacaacgccaacctgaaaaaaccatgcatgaacggttaaaagggaaaggggtaatagtggatatggcgagcttatttaaacaagcaggttagccatgagaaactttcctgttccgtactcgaatgagctgatttatagcactattgcacgggcaggcgtttatcaagggattgttagtcctaagcagctgttggatgaggtgtatggcaaccgcaaggtggtcgctaccttaggtctgccctcgcatttaggtgtgatagcaagacatctacatcaaacaggacgttacgctgttcagcagcttatttatgagcataccttattccctttatatgctccgtttgtaggcaaggagcgccgagacgaagctattcggttaatggagtaccaagcgcaaggtgcggtgcatttaatgctaggagtcgctgcttctagagttaagagcgataaccgctttagatactgccctgattgcgttgctcttcagctaaataggtatggggaagccttttggcaacgagattggtatttgcccgctttgccatattgtccaaaacacggtgctttagtcttctttgatagagctgtagatgatcaccgacatcaattttgggctttgggtcatactgagctgctttcagactaccccaaagactccctatctcaattaacagcactagctgcttatatagcccctctgttagatgctccacgagcgcaagagctttccccaagccttgagcagtggacgctgttttatcagcgcttagcgcaggatctagggctaaccaaaagcaagcacattcgtcatgacttggtggcggagagagtgaggcagacttttagtgatgaggcactagagaaactggatttaaagttggcagagaacaaggacacgtgttggctgaaaagtatattccgtaagcatagaaaagcctttagttatttacagcatagtattgtgtggcaagccttattgccaaaactaacggttatagaagcgctacagcaggcaagtgctcttactgagcactctataacgacaagacctgttagccagtctgtgcaacctaactctgaagatttatctgttaagcataaagactggcagcaactagtgcataaataccaaggaattaaggcggcaagacagtctttagagggtggggtgctatacgcttggctttaccgacatgacagggattggctagttcactggaatcaacagcatcaacaagagcgtctggcacccgcccctagagttgattggaaccaaagagatcgaattgctgtacgacaactattaagaatcataaagcgtctagatagtagccttgatcacccaagagcgacatcgagctggctgttaaagcaaactcctaacggaacctctcttgcaaaaaatctacagaaactgcctttggtagcgctttgcttaaagcgttactcagagagtgtggaagattatcaaattagacggattagccaagcttttattaagcttaaacaggaagatgttgagcttaggcgctggcgattattaagaagtgcaacgttatctaaagagcggataactgaggaagcacaaagattcttggaaatggtttatggggaagagtgagtggttaggctagctacatttaatgacaatgtgcaggttgtacatattggtcatttattccgtaactcgggtcataaggagtggcgtatttttgtttggtttaatccaatgcaagaacggaaatggactcgatttactcatttgcctttattaagtcgagctaaggtggttaacagtacaacaaagcaaataaataaggcggatcgtgtgattgagtttgaagcatcggatcttcaacgagccaaaataatcgattttcctaatctctcgtcctttgcttccgtacgcaacaaggatggagcgcagagttcatttatttacgaagctgaaacaccatatagcaagactcgttatcacatcccacagttagagctagctcggtcattatttttaggggatcctctagagtcgacctgcaggcatgcaagcttggctgttttggcggatgagagaagattttcagcctgatacagattaaatcagaacgcagaagcggtctgataaaacagaatttgcctggcggcagtagcgcggtggtcccacctgaccccatgccgaactcagaagtgaaacgccgtagcgccgatggtagtgtggggtctccccatgcgagagtagggaactgccaggcatcaaataaaacgaaaggctcagtcgaaagactgggcctttcgttttatctgttgtttgtcggtgaacgctctcctgagtaggacaaatccgccgggagcggatttgaacgttgcgaagcaacggcccggagggtggcgggcaggacgcccgccataaactgccaggcatcaaattaagcagaaggccatcctgacggatggcctttttgcgtttctacaaactcttttgtttatttttctaaatacattcaaatatgtatccgctcatgagacaataaccctgataaatgcttcaataatattgaaaaaggaagagtatgagtattcaacatttccgtgtcgcccttattcccttttttgcggcattttgccttcctgtttttgctcacccagaaacgctggtgaaagtaaaagatgctgaagatcagttgggtgcacgagtgggttacatcgaactggatctcaacagcggtaagatccttgagagttttcgccccgaagaacgttttccaatgatgagcacttttaaagttctgctatgtggcgcggtattatcccgtgttgacgccgggcaagagcaactcggtcgccgcatacactattctcagaatgacttggttgagtactcaccagtcacagaaaagcatcttacggatggcatgacagtaagagaattatgcagtgctgccataaccatgagtgataacactgcggccaacttacttctgacaacgatcggaggaccgaaggagctaaccgcttttttgcacaacatgggggatcatgtaactcgccttgatcgttgggaaccggagctgaatgaagccataccaaacgacgagcgtgacaccacgatgcctgcagcaatggcaacaacgttgcgcaaactattaactggcgaactacttactctagcttcccggcaacaattaatagactggatggaggcggataaagttgcaggaccacttctgcgctcggcccttccggctggctggtttattgctgataaatctggagccggtgagcgtgggtctcgcggtatcattgcagcactggggccagatggtaagccctcccgtatcgtagttatctacacgacggggagtcaggcaactatggatgaacgaaatagacagatcgctgagataggtgcctcactgattaagcattggtaactgtcagaccaagtttactcatatatactttagattgatttacgcgccctgtagcggcgcattaagcgcggcgggtgtggtggttacgcgcagcgtgaccgctacacttgccagcgccctagcgcccgctcctttcgctttcttcccttcctttctcgccacgttcgccgccggccagcctcgcagagcaggattcccgttgagcaccgccaggtgcgaataagggacagtgaagaaggaacacccgctcgcgggtgggcctacttcacctatcctgcccggcggcatcaccggcgccacaggtgcggttgctggcgcctatatcgccgacatcaccgatggggaagatcgggctcgccacttcgggctcatgagcgcttgtttcggcgtgggtatggtggcaggccccgtggccgggggactgttgggcgccatctccttgcatgcaccattccttgcggcggcggtgctcaacggcctcaacctactactgggctgcttcctaatgcaggagtcgcataagggagagcgtcgatccccgacagtaagacgggtaagcctgttgatgataccgctgccttactgggtgcattagccagtctgaatgacctgtcacgggataatccgaagtggtcagactggaaaatcagagggcaggaactgctgaacagcaaaaagtcagatagcaccacatagcagacccgccataaaacgccctgagaagcccgtgacgggcttttcttgtattatgggtagtttccttgcatgaatccataaaaggcgcctgtagtgccatttacccccattcactgccagagccgtgagcgcagcgaactgaatgtcacgaaaaagacagcgactcaggtgcctgatggtcggagacaaaaggaatattcagcgatttgcccgagcttgcgagggtgctacttaagcctttagggttttaaggtctgttttgtagaggagcaaacagcgtttgcgacatccttttgtaatactgcggaactgactaaagtagtgagttatacacagggctgggatctattctttttatctttttttattctttctttattctataaattataaccacttgaatataaacaaaaaaaacacacaaaggtctagcggaatttacagagggtctagcagaatttacaagttttccagcaaaggtctagcagaatttacagatacccacaactcaaaggaaaaggactagtaattatcattgactagcccatctcaattggtatagtgattaaaatcacctagaccaattgagatgtatgtctgaattagttgttttcaaagcaaatgaactagcgattagtcgctatgacttaacggagcatgaaaccaagctaattttatgctgtgtggcactactcaaccccacgattgaaaaccctacaaggaaagaacggacggtatcgttcacttataaccaatacgttcagatgatgaacatcagtagggaaaatgcttatggtgtattagctaaagcaaccagagagctgatgacgagaactgtggaaatcaggaatcctttggttaaaggctttgagattttccagtggacaaactatgccaagttctcaagcgaaaaattagaattagtttttagtgaagagatattgccttatcttttccagttaaaaaaattcataaaatataatctggaacatgttaagtcttttgaaaacaaatactctatgaggatttatgagtggttattaaaagaactaacacaaaagaaaactcacaaggcaaatatagagattagccttgatgaatttaagttcatgttaatgcttgaaaataactaccatgagtttaaaaggcttaaccaatgggttttgaaaccaataagtaaagatttaaacacttacagcaatatgaaattggtggttgataagcgaggccgcccgactgatacgttgattttccaagttgaactagatagacaaatggatctcgtaaccgaacttgagaacaaccagataaaaatgaatggtgacaaaataccaacaaccattacatcagattcctacctacataacggactaagaaaaacactacacgatgctttaactgcaaaaattcagctcaccagttttgaggcaaaatttttgagtgacatgcaaagtaagtatgatctcaatggttcgttctcatggctcacgcaaaaacaacgaaccacactagagaacatactggctaaatacggaaggatctgaggttcttatggctcttgtatctatcagtgaagcatcaagactaacaaacaaaagtagaacaactgttcaccgttacatatcaaagggaaaactgtccatatgcacagatgaaaacggtgtaaaaaagatagatacatcagagcttttacgagtttttggtgcatttaaagctgttcaccatgaacagatcgacaatgtaacagatgaacagcatgtaacacctaatagaacaggtgaaaccagtaaaacaaagcaactagaacatgaaattgaacacctgagacaacttgttacagctcaacagtcacacatagacagcctgaaacaggcgatgctgcttatcgaatcaaagctgccgacaacacgggagccagtgacgcctcccgtggggaaaaaatcatggcaattctggaagaaatagcgctttcagcctgtgggcggacaaaatagttgggaactgggaggggtggaaatggagtttttaaggattatttagggaagagtgacaaaatagatgggaactgggtgtagcgtcgtaagctaatacgaaaattaaaaatgacaaaatagtttggaactagatttcacttatctggttggtcgacactagtattaccctgttatccctagatttaaatgatatcggatcctagtaagccacgttttaatcgttagttagttatcttcaagagaaaatgtaatcacactggctcaccttcgggtgggcctttctgcgtttataaggagacactttgaattcgagctcaggcgcgccagcacatttgttgatacaaccataaaatgataattacacccataaattgataattatcacacccataaattgatattgcctcttcatggtctaaacttcagtaagtttacgacattttcatgaagaggtcatttctttaaatgatatcggatcctagtaagccacgttgtgtctcaaaatctctgatgttacattgcacaagataaaaatatatcatcatgaacaataaaactgtctgcttacataaacagtaatacaaggggtgttatgagccatattcaacgggaaacgtcttgctcgaggccgcgattaaattccaacatggatgctgatttatatgggtataaatgggctcgcgataatgtcgggcaatcaggtgcgacaatctatcgattgtatgggaagcccgatgcgccagagttgtttctgaaacatggcaaaggtagcgttgccaatgatgttacagatgagatggtcagactaaactggctgacggaatttatgcctcttccgaccatcaagcattttatccgtactcctgatgatgcatggttactcaccactgcgatccccgggaaaacagcattccaggtattagaagaatatcctgattcaggtgaaaatattgttgatgcgctggcagtgttcctgcgccggttgcattcgattcctgtttgtaattgtccttttaacagcgatcgcgtatttcgtctcgctcaggcgcaatcacgaatgaataacggtttggttgatgcgagtgattttgatgacgagcgtaatggctggcctgttgaacaagtctggaaagaaatgcataagcttttgccattctcaccggattcagtcgtcactcatggtgatttctcacttgataaccttatttttgacgaggggaaattaataggttgtattgatgttggacgagtcggaatcgcagaccgataccaggatcttgccatcctatggaactgcctcggtgagttttctccttcattacagaaacggctttttcaaaaatatggtattgataatcctgatatgaataaattgcagtttcatttgatgctcgatgagtttttctaatcagaattggttaattggttgtaacactggcagagcattacgctgacttgacgggacggcggctttgttgaataaatcttactgcagtagttttgctgaaatactcgattcacaaaaatatcaacttatggttgttttgtgagatatcaatatatggttgttttgtggttaagttgctgattataaataattattaaatatcactttatggttgcatcaacaacattgcgtttaaacgctgagggaaagttcgaatccgacgtccctcctgtgtgaaattgttatggcgactcgagttcgaatgtctcctcagccctgcaggaagctttacgaccagtctaaaaagcgcctgaattcgcgaccttctcgttactgacaggaaaatgggccattggcaaccagggaaagatgaacgtgatgatgttcacaatttgctgaattgtggtgatgtgatgctcaccgcatttccttaattaacgccggatggtagtgtggggtctccccatgcgagagtagggaactgccaggcatcaaataaaacgaaaggctcagtcgaaagactgggcctttcgttttatctgttgtttgtcggtgaacgctctcctgagtaggacaaatccgccgggagcggatttgaacgttgcgaagcaacggcccggagggtggcgggcaggacgcccgccataaactgccaggcatcaaattaagcagaaggccatcctgacggatggcctttttgcgtttagttagttatctcctaggacgcgccacggccgcgtcgaccccacgcccctctttaatacgacgggcaatttgcacttcagaaaatgaagagtttgctttagccataacaaaagtccagtatgctttttcacagcataactggactgatttcagtttacaactattctgtctagtttaagactttattgtcatagtttagatctattttgttcagtttaagactttattgtccgcccaca

SEQ ID NO: 5558 - DNA, 6329 bp, Artificial Sequence
  Description of Artificial Sequence: Synthetic polynucleotide
catcgatttattatgacaacttgacggctacatcattcactttttcttcacaaccggcacggaactcgctcgggctggccccggtgcattttttaaatacccgcgagaaatagagttgatcgtcaaaaccaacattgcgaccgacggtggcgataggcatccgggtggtgctcaaaagcagcttcgcctggctgatacgttggtcctcgcgccagcttaagacgctaatccctaactgctggcggaaaagatgtgacagacgcgacggcgacaagcaaacatgctgtgcgacgctggcgatatcaaaattgctgtctgccaggtgatcgctgatgtactgacaagcctcgcgtacccgattatccatcggtggatggagcgactcgttaatcgcttccatgcgccgcagtaacaattgctcaagcagatttatcgccagcagctccgaatagcgcccttccccttgcccggcgttaatgatttgcccaaacaggtcgctgaaatgcggctggtgcgcttcatccgggcgaaagaaccccgtattggcaaatattgacggccagttaagccattcatgccagtaggcgcgcggacgaaagtaaacccactggtgataccattcgcgagcctccggatgacgaccgtagtgatgaatctctcctggcgggaacagcaaaatatcacccggtcggcaaacaaattctcgtccctgatttttcaccaccccctgaccgcgaatggtgagattgagaatataacctttcattcccagcggtcggtcgataaaaaaatcgagataaccgttggcctcaatcggcgttaaacccgccaccagatgggcattaaacgagtatcccggcagcaggggatcattttgcgcttcagccatacttttcatactcccgccattcagagaagaaaccaattgtccatattgcatcagacattgccgtcactgcgtcttttactggctcttctcgctaaccaaaccggtaaccccgcttattaaaagcattctgtaacaaagcgggaccaaagccatgacaaaaacgcgtaacaaaagtgtctataatcacggcagaaaagtccacattgattatttgcacggcgtcacactttgctatgccatagcatttttatccataagattagcggatcctacctgacgctttttatcgcaactctctactgtttctccatacccgtttttttgggaattcgagctctaaggaggttataaaaaatggatattaatactgaaactgagatcaagcaaaagcattcactaaccccctttcctgttttcctaatcagcccggcatttcgcgggcgatattttcacagctatttcaggagttcagccatgaacgcttattacattcaggatcgtcttgaggctcagagctgggcgcgtcactaccagcagctcgcccgtgaagagaaagaggcagaactggcagacgacatggaaaaaggcctgccccagcacctgtttgaatcgctatgcatcgatcatttgcaacgccacggggccagcaaaaaatccattacccgtgcgtttgatgacgatgttgagtttcaggagcgcatggcagaacacatccggtacatggttgaaaccattgctcaccaccaggttgatattgattcagaggtataaaacgaatgagtactgcactcgcaacgctggctgggaagctggctgaacgtgtcggcatggattctgtcgacccacaggaactgatcaccactcttcgccagacggcatttaaaggtgatgccagcgatgcgcagttcatcgcattactgatcgttgccaaccagtacggccttaatccgtggacgaaagaaatttacgcctttcctgataagcagaatggcatcgttccggtggtgggcgttgatggctggtcccgcatcatcaatgaaaaccagcagtttgatggcatggactttgagcaggacaatgaatcctgtacatgccggatttaccgcaaggaccgtaatcatccgatctgcgttaccgaatggatggatgaatgccgccgcgaaccattcaaaactcgcgaaggcagagaaatcacggggccgtggcagtcgcatcccaaacggatgttacgtcataaagccatgattcagtgtgcccgtctggccttcggatttgctggtatctatgacaaggatgaagccgagcgcattgtcgaaaatactgcatacactgcagaacgtcagccggaacgcgacatcactccggttaacgatgaaaccatgcaggagattaacactctgctgatcgccctggataaaacatgggatgacgacttattgccgctctgttcccagatatttcgccgcgacattcgtgcatcgtcagaactgacacaggccgaagcagtaaaagctcttggattcctgaaacagaaagccgcagagcagaaggtggcagcatgacaccggacattatcctgcagcgtaccgggatcgatgtgagagctgtcgaacagggggatgatgcgtggcacaaattacggctcggcgtcatcaccgcttcagaagttcacaacgtgatagcaaaaccccgctccggaaagaagtggcctgacatgaaaatgtcctacttccacaccctgcttgctgaggtttgcaccggtgtggctccggaagttaacgctaaagcactggcctggggaaaacagtacgagaacgacgccagaaccctgtttgaattcacttccggcgtgaatgttactgaatccccgatcatctatcgcgacgaaagtatgcgtaccgcctgctctcccgatggtttatgcagtgacggcaacggccttgaactgaaatgcccgtttacctcccgggatttcatgaagttccggctcggtggtttcgaggccataaagtcagcttacatggcccaggtgcagtacagcatgtgggtgacgcgaaaaaatgcctggtactttgccaactatgacccgcgtatgaagcgtgaaggcctgcattatgtcgtgattgagcgggatgaaaagtacatggcgagttttgacgagatcgtgccggagttcatcgaaaaaatggacgaggcactggctgaaattggttttgtatttggggagcaatggcgatgacgcatcctcacgataatatccgggtaggcgcaatcactttcgtctactccgttacaaagcgaggctgggtatttcccggcctttctgttatccgaaatccactgaaagcacagcggctggctgaggagataaataataaacgaggggctgtatgcacaaagcatcttctgttgagttaagaacgagtatcgagatggcacatagccttgctcaaattggaatcaggtttgtgccaataccagtagaaacagacgaagaatccatgggtatggacagttttccctttgatatgtaacggtgaacagttgttctacttttgtttgttagtcttgatgcttcactgatagatacaagagccataagaacctcagatccttccgtatttagccagtatgttctctagtgtggttcgttgtttttgcgtgagccatgagaacgaaccattgagatcatacttactttgcatgtcactcaaaaattttgcctcaaaactggtgagctgaatttttgcagttaaagcatcgtgtagtgtttttcttagtccgttacgtaggtaggaatctgatgtaatggttgttggtattttgtcaccattcatttttatctggttgttctcaagttcggttacgagatccatttgtctatctagttcaacttggaaaatcaacgtatcagtcgggcggcctcgcttatcaaccaccaatttcatattgctgtaagtgtttaaatctttacttattggtttcaaaacccattggttaagccttttaaactcatggtagttattttcaagcattaacatgaacttaaattcatcaaggctaatctctatatttgccttgtgagttttcttttgtgttagttcttttaataaccactcataaatcctcatagagtatttgttttcaaaagacttaacatgttccagattatattttatgaatttttttaactggaaaagataaggcaatatctcttcactaaaaactaattctaatttttcgcttgagaacttggcatagtttgtccactggaaaatctcaaagcctttaaccaaaggattcctgatttccacagttctcgtcatcagctctctggttgctttagctaatacaccataagcattttccctactgatgttcatcatctgagcgtattggttataagtgaacgataccgtccgttctttccttgtagggttttcaatcgtggggttgagtagtgccacacagcataaaattagcttggtttcatgctccgttaagtcatagcgactaatcgctagttcatttgctttgaaaacaactaattcagacatacatctcaattggtctaggtgattttaatcactataccaattgagatgggctagtcaatgataattactagtccttttcctttgagttgtgggtatctgtaaattctgctagacctttgctggaaaacttgtaaattctgctagaccctctgtaaattccgctagacctttgtgtgttttttttgtttatattcaagtggttataatttatagaataaagaaagaataaaaaaagataaaaagaatagatcccagccctgtgtataactcactactttagtcagttccgcagtattacaaaaggatgtcgcaaacgctgtttgctcctctacaaaacagaccttaaaaccctaaaggcttaagtagcaccctcgcaagctcggttgcggccgcaatcgggcaaatcgctgaatattccttttgtctccgaccatcaggcacctgagtcgctgtctttttcgtgacattcagttcgctgcgctcacggctctggcagtgaatgggggtaaatggcactacaggcgccttttatggattcatgcaaggaaactacccataatacaagaaaagcccgtcacgggcttctcagggcgttttatggcgggtctgctatgtggtgctatctgactttttgctgttcagcagttcctgccctctgattttccagtctgaccacttcggattatcccgtgacaggtcattcagactggctaatgcacccagtaaggcagcggtatcatcaacggggtctgacgctcagtggaacgaaaactcacgttaagggattttggtcatgagattatcaaaaaggatcttcacctagatccttttaaattaaaaatgaagttttaaatcaatctaaagtatatatgagtaaacttggtctgacagttaccaatgcttaatcagtgaggcacctatctcagcgatctgtctatttcgttcatccatagttgcctgactccccgtcgtgtagataactacgatacgggagggcttaccatctggccccagtgctgcaatgataccgcgagacccacgctcaccggctccagatttatcagcaataaaccagccagccggaagggccgagcgcagaagtggtcctgcaactttatccgcctccatccagtctattaattgttgccgggaagctagagtaagtagttcgccagttaatagtttgcgcaacgttgttgccattgctacaggcatcgtggtgtcacgctcgtcgtttggtatggcttcattcagctccggttcccaacgatcaaggcgagttacatgatcccccatgttgtgcaaaaaagcggttagctccttcggtcctccgatcgttgtcagaagtaagttggccgcagtgttatcactcatggttatggcagcactgcataattctcttactgtcatgccatccgtaagatgcttttctgtgactggtgagtactcaaccaagtcattctgagaatagtgtatgcggcgaccgagttgctcttgcccggcgtcaatacgggataataccgcgccacatagcagaactttaaaagtgctcatcattggaaaacgttcttcggggcgaaaactctcaaggatcttaccgctgttgagatccagttcgatgtaacccactcgtgcacccaactgatcttcagcatcttttactttcaccagcgtttctgggtgagcaaaaacaggaaggcaaaatgccgcaaaaaagggaataagggcgacacggaaatgttgaatactcatactcttcctttttcaatattattgaagcatttatcagggttattgtctcatgagcggatacatatttgaatgtatttagaaaaataaacaaataggggttccgcgcacatttccccgaaaagtgccacctg

SEQ ID NO: 5559 - DNA, 5086 bp, Artificial Sequence
  Description of Artificial Sequence: Synthetic polynucleotide
  modified_base (1641)..(1646): a, c, t, g, unknown or other
agcggaagagcgcccaatacgcaaaccgcctctccccgcgcgttggccgattcattaatgcagctggcacgacaggtttcccgactggaaagcgggcagtgagcgcaacgcaattaatgtgagttagctcactcattaggcaccccaggctttacactttatgcttccggctcgtatgttgtgtggaattgtgagcggataacaatttcacacaggaaacagctatgaccatgattacgccaagcgcgcaattaaccctcactaaagggaacaaaagctggagctccaccgcggtggcggccgctctagaactagtggatcccccgggctgcaggaattcgatatcaagcttatcgataccgtcgacctcgagggggggcccggtacccaattcgccctatagtgagtcgtattacgcgcgctcactggccgtcgttttacaacgtcgtgactgggaaaaccctggcgttacccaacttaatcgccttgcagcacatccccctttcgccagctggcgtaatagcgaagaggcccgcaccgatcgcccttcccaacagttgcgcagcctgaatggcgaatgggacgcgccctgtagcggcgcattaagcgcggcgggtgtggtggttacgcgcagcgtgaccgctacacttgccagcgccctagcgcccgctcctttcgctttcttcccttcctttctcgccacgttcgccggctttccccgtcaagctctaaatcgggggctccctttagggttccgatttagtgctttacggcacctcgaccccaaaaaacttgattagggtgatggttcacgtagtgggccatcgccctgatagacggtttttcgccctttgacgttggagtccacgttctttaatagtggactcttgttccaaactggaacaacactcaaccctatctcggtctattcttttgatttataagggattttgccgatttcggcctattggttaaaaaatgagctgatttaacaaaaatttaacgcgaattttaacaaaatattaacgcttacaatttaggtggcacttttcggggaaatgtgcgcggaacccctatttgtttatttttctaaatacattcaaatatgtatccgctcatgagattatcaaaaaggatcttcacctagatccttttggcgtagcaccaggcgtttaagggcaccaataactgccttaaaaaaacgccccgccctgccactcatcgcagtactgttgtaattcattaagcattctgccgacatggaagccatcacaaacggcatgatgaacctgaatcgccagcggcatcagcaccttgtcgccttgcgtataatatttgcccatggtgaaaacgggggcgaagaagttgtccatattggccacgtttaaatcaaaactggtgaaactcacccagggattggctgagacgaaaaacatattctcaataaaccctttagggaaataggccaggttttcaccgtaacacgccacatcttgcgaatatatgtgtagaaactgccggaaatcgtcgtggtattcactccagagcgatgaaaacgtttcagtttgctcatggaaaacggtgtaacaagggtgaacactatcccatatcaccagctcaccgtctttcattgccatacgnnnnnncggatgagcattcatcaggcgggcaagaatgtgaataaaggccggataaaacttgtgcttatttttctttacggtctttaaaaaggccgtaatatccagctgaacggtctggttataggtacattgagcaactgactgaaatgcctcaaaatgttctttacgatgccattgggatatatcaacggtggtatatccagtgatttttttctccattttagcttccttagctcctgaaaatctcgataactcaaaaaatacgcccggtagtgatcttatttcattatggtgaaagttggaacctcttacattattgaagcatttatcagggttattgtctcatgaccaaaatcccttaacgtgagttttcgttccactgagcgtcagatccgacagtaagacgggtaagcctgttgatgataccgctgccttactgggtgcattagccagtctgaatgacctgtcacgggataatccgaagtggtcagactggaaaatcagagggcaggaactgctgaacagcaaaaagtcagatagcaccacatagcagacccgccataaaacgccctgagaagcccgtgacgggcttttcttgtattatgggtagtttccttgcatgaatccataaaaggcgcctgtagtgccatttacccccattcactgccagagccgtgagcgcagcgaactgaatgtcacgaaaaagacagcgactcaggtgcctgatggtcggagcaaaaggaatattcagcgatttgcccgagcttgcgagggtgctacttaagcctttagggttttaaggtctgttttgtagaggagcaaacagcgtttgcgacatccttttgtaatactgcggaactgactaaagtagtgagttatacacagggctgggatctattctttttatctttttttattctttctttattctataaattataaccacttgaatataaacaaaaaaaacacacaaaggtctagcggaatttacagagggtctagcagaatttacaagttttccagcaaaggtctagcagaatttacagatacccacaactcaaaggaaaaggactagtaattatcattgactagcccatctcaattggtatagtgattaaaatcacctagaccaattgagatgtatgtctgaattagttgttttcaaagcaaatgaactagcgattagtcgctatgacttaacggagcatgaaaccaagctaattttatgctgtgtggcactactcaaccccacgattgaaaaccctacaaggaaagaacggacggtatcgttcacttataaccaatacgctcagatgatgaacatcagtagggaaaatgcttatggtgtattagctaaagcaaccagagagctgatgacgagaactgtggaaatcaggaatcctttggttaaaggctttgagattttccagtggacaaactatgccaagttctcaagcgaaaaattagaattagtttttagtgaagagatattgccttatcttttccagttaaaaaaattcataaaatataatctggaacatgttaagtcttttgaaaacaaatactctatgaggatttatgagtggttattaaaagaactaacacaaaagaaaactcacaaggcaaatatagagattagccttgatgaatttaagttcatgttaatgcttgaaaataactaccatgagtttaaaaggcttaaccaatgggttttgaaaccaataagtaaagatttaaacacttacagcaatatgaaattggtggttgataagcgaggccgcccgactgatacgttgattttccaagttgaactagatagacaaatggatctcgtaaccgaacttgagaacaaccagataaaaatgaatggtgacaaaataccaacaaccattacatcagattcctacctacgtaacggactaagaaaaacactacacgatgctttaactgcaaaaattcagctcaccagttttgaggcaaaatttttgagtgacatgcaaagtaagcatgatctcaatggttcgttctcatggctcacgcaaaaacaacgaaccacactagagaacatactggctaaatacggaaggatctgaggttcttatggctcttgtatctatcagtgaagcatcaagactaacaaacaaaagtagaacaactgttcaccgttacatatcaaagggaaaactgtccatatgcacagatgaaaacggtgtaaaaaagatagatacatcagagcttttacgagtttttggtgcatttaaagctgttcaccatgaacagatcgacaatgtaacagatgaacagcatgtaacacctaatagaacaggtgaaaccagtaaaacaaagcaactagaacatgaaattgaacacctgagacaacttgttacagctcaacagtcacacatagacagcctgaaacaggcgatgctgcttatcgaatcaaagctgccgacaacacgggagccagtgacgcctcccgtggggaaaaaatcatggcaattctggaagaaatagcgctttcagccggcaaacctgaagccggatctgcgattctgataacaaactagcaacaccagaacagcccgtttgcgggcagcaaaacccgtacttttggacgttccggcggttttttgtggcgagtggtgttcgggcggtgcgcgcaagatccattatgttaaacgggcgagtttacatctcaaaaccgcccgcttaacaccatcagaaatcctcagcgcgattttaagcaccaacccccccccgtaacacccaaatccatactgaaagtggctttgttgaataaatcgaacttttgctgagttgaaggatcagatcacgcatcctcccgacaacacagaccattccgtggcaaagcaaaagttcagaatcaccaactggtccacctacaacaaagctctcatcaaccgtggctccctcactttctggctggatgatgaggcgattcaggcctggtatgagtcggcaacaccttcatcacgaggaaggccccagcgctattctgatctcgccatcaccaccgttctggtgattaaacgcgtattccggctgaccctgcgggctgcgcagggttttattgattccatttttgccctgatgaacgttccgttgcgctgcccggattacaccagtgtcagtaagcgggcaaagtcggttaatgtcagtttcaaaacgtccacccggggtgaaatcgcacacctggtgattgattccaccgggctgaaggtctttggtgaaggcgaatggaaagtcagaaagcacggcaaagagcgccgtcgtatctggcgaaagttgcatcttgctgttggatctcacatgttctttcctgcgttatcccctgattctgtggataaccgtattaccgcctttgagtgagctgataccgctcgccgcagccgaacgaccgagcgcagcgagtcagtgagcgagga

SEQ ID NO: 5560 - DNA, 5535 bp, Artificial Sequence
  Description of Artificial Sequence: Synthetic polynucleotide
atcgatgcataatgtgcctgtcaaatggacgaagcagggattctgcaaaccctatgctactccgtcaagccgtcaattgtctgattcgttaccaattatgacaacttgacggctacatcattcactttttcttcacaaccggcacggaactcgctcgggctggccccggtgcattttttaaatacccgcgagaaatagagttgatcgtcaaaaccaacattgcgaccgacggtggcgataggcatccgggtggtgctcaaaagcagcttcgcctggctgatacgttggtcctcgcgccagcttaagacgctaatccctaactgctggcggaaaagatgtgacagacgcgacggcgacaagcaaacatgctgtgcgacgctggcgatatcaaaattgctgtctgccaggtgatcgctgatgtactgacaagcctcgcgtacccgattatccatcggtggatggagcgactcgttaatcgcttccatgcgccgcagtaacaattgctcaagcagatttatcgccagcagctccgaatagcgcccttccccttgcccggcgttaatgatttgcccaaacaggtcgctgaaatgcggctggtgcgcttcatccgggcgaaagaaccccgtattggcaaatattgacggccagttaagccattcatgccagtaggcgcgcggacgaaagtaaacccactggtgataccattcgcgagcctccggatgacgaccgtagtgatgaatctctcctggcgggaacagcaaaatatcacccggtcggcaaacaaattctcgtccctgatttttcaccaccccctgaccgcgaatggtgagattgagaatataacctttcattcccagcggtcggtcgataaaaaaatcgagataaccgttggcctcaatcggcgttaaacccgccaccagatgggcattaaacgagtatcccggcagcaggggatcattttgcgcttcagccatacttttcatactcccgccattcagagaagaaaccaattgtccatattgcatcagacattgccgtcactgcgtcttttactggctcttctcgctaaccaaaccggtaaccccgcttattaaaagcattctgtaacaaagcgggaccaaagccatgacaaaaacgcgtaacaaaagtgtctataatcacggcagaaaagtccacattgattatttgcacggcgtcacactttgctatgccatagcatttttatccataagattagcggatcctacctgacgctttttatcgcaactctctactgtttctccatacccgtttttttgggctagcaggaggaattcaccatggtacccggggatcctctagagtcgacctgcaggcatgcaagcttggctgttttggcggatgagagaagattttcagcctgatacagattaaatcagaacgcagaagcggtctgataaaacagaatttgcctggcggcagtagcgcggtggtcccacctgaccccatgccgaactcagaagtgaaacgccgtagcgccgatggtagtgtggggtctccccatgcgagagtagggaactgccaggcatcaaataaaacgaaaggctcagtcgaaagactgggcctttcgttttatctgttgtttgtcggtgaacgctctcctgagtaggacaaatccgccgggagcggatttgaacgttgcgaagcaacggcccggagggtggcgggcaggacgcccgccataaactgccaggcatcaaattaagcagaaggccatcctgacggatggcctttttgcgtttctacaaactcttttgtttatttttctaaatacattcaaatatgtatccgctcatggagctcgatgcttgtaaaccgttttgtgaaaaaatttttaaaataaaaaaggggacctctagggtccccaattaattagtaatataatctattaaaggtcattcaaaaggtcatccaccggatcagcttagtaaagccctcgctagattttaatgcggatgttgcgattacttcgccaactattgcgataacaagaaaaagccagcctttcatgatatatctcccaatttgtgtagggcttattatgcacgcttaaaaataataaaagcagacttgacctgatagtttggctgtgagcaattatgtgcttagtgcatctaacgcttgagttaagccgcgccgcgaagcggcgtcggcttgaacgaattgttagacattatttgccgactaccttggtgatctcgcctttcacgtagtggacaaattcttccaactgatctgcgcgcgaggccaagcgatcttcttcttgtccaagataagcctgtctagcttcaagtatgacgggctgatactgggccggcaggcgctccattgcccagtcggcagcgacatccttcggcgcgattttgccggttactgcgctgtaccaaatgcgggacaacgtaagcactacatttcgctcatcgccagcccagtcgggcggcgagttccatagcgttaaggtttcatttagcgcctcaaatagatcctgttcaggaaccggatcaaagagttcctccgccgctggacctaccaaggcaacgctatgttctcttgcttttgtcagcaagatagccagatcaatgtcgatcgtggctggctcgaagatacctgcaagaatgtcattgcgctgccattctccaaattgcagttcgcgcttagctggataacgccacggaatgatgtcgtcgtgcacaacaatggtgacttctacagcgcggagaatctcgctctctccaggggaagccgaagtttccaaaaggtcgttgatcaaagctcgccgcgttgtttcatcaagccttacggtcaccgtaaccagcaaatcaatatcactgtgtggcttcaggccgccatccactgcggagccgtacaaatgtacggccagcaacgtcggttcgagatggcgctcgatgacgccaactacctctgatagttgagtcgatacttcggcgatcaccgcttccctcatgatgtttaactttgttttagggcgactgccctgctgcgtaacatcgttgctgctccataacatcaaacatcgacccacggcgtaacgcgcttgctgcttggatgcccgaggcatagactgtaccccaaaaaaacagtcataacaagccatgaaaaccgccactgcgccgttaccaccgctgcgttcggtcaaggttctggaccagttgcgtgagcgcatacgctacttgcattacagcttacgaaccgaacaggcttatgtccactgggttcgtgccttcatccgtttccacggtgtgcgtcacccggcaaccttgggcagcagcgaagtcgaggcatttctgtcctggctggcgaacgagcgcaaggtttcggtctccacgcatcgtcaggcattggcggccttgctgttcttctacggcaaggtctgtgcacggatctgccctggcttcaggagatcggaagacctcggccgtcgcggcgcttgccggtggtgctgaccccggatgaagtggttcgcatcctcggttttctggaaggcgagcatcgtttgttcgcccagcttctgtatggaacgggcatgcggatcagtgagggtttgcaactgcgggtcaaggatctggatttcgatcacggcacgatcatcgtgcgggagggcaagggctccaaggatcgggccttgatgttacccgagagcttggcacccagcctgcgcgagcaggggaattgatccggtggatgaccttttgaatgacctttaatagattatattactaattaattggggaccctagaggtccccttttttattttaaaaattttttcacaaaacggtttacaagcatcgagctctccatgaccaaaatcccttaacgtgagttttcgttccactgagcgtcagaccccgtagaaaagatcaaaggatcttcttgagatcctttttttctgcgcgtaatctgctgcttgcaaacaaaaaaaccaccgctaccagcggtggtttgtttgccggatcaagagctaccaactctttttccgaaggtaactggcttcagcagagcgcagataccaaatactgtccttctagtgtagccgtagttaggccaccacttcaagaactctgtagcaccgcctacatacctcgctctgctaatcctgttaccagtggctgctgccagtggcgataagtcgtgtcttaccgggttggactcaagacgatagttaccggataaggcgcagcggtcgggctgaacggggggttcgtgcacacagcccagcttggagcgaacgacctacaccgaactgagatacctacagcgtgagctatgagaaagcgccacgcttcccgaagggagaaaggcggacaggtatccggtaagcggcagggtcggaacaggagagcgcacgagggagcttccagggggaaacgcctggtatctttatagtcctgtcgggtttcgccacctctgacttgagcgtcgatttttgtgatgctcgtcaggggggcggagcctatggaaaaacgccagcaacgcggcctttttacggttcctggccttttgctggccttttgctcacatgttctttcctgcgttatcccctgattctgtggataaccgtattaccgcctttgagtgagctgataccgctcgccgcagccgaacgaccgagcgcagcgagtcagtgagcgaggaagcggaagagcgcctgatgcggtattttctccttacgcatctgtgcggtatttcacaccgcatatggtgcactctcagtacaatctgctctgatgccgcatagttaagccagtatacactccgctatcgctacgtgactgggtcatggctgcgccccgacacccgccaacacccgctgacgcgccctgacgggcttgtctgctcccggcatccgcttacagacaagctgtgaccgtctccgggagctgcatgtgtcagaggttttcaccgtcatcaccgaaacgcgcgaggcagctgcggtaaagctcatcagcgtggtcgtgaagcgattcacagatgtctgcctgttcatccgcgtccagctcgttgagtttctccagaagcgttaatgtctggcttctgataaagcgggccatgttaagggcggttttttcctgtttggtcactgatgcctccgtgtaagggggatttctgttcatgggggtaatgataccgatgaaacgagagaggatgctcacgatacgggttactgatgatgaacatgcccggttactggaacgttgtgagggtaaacaactggcggtatggatgcggcgggaccagagaaaaatcactcagggtcaatgccagcgctagcagcacgccatagtgactggcgatgctgtcggaatggacgatatcccgcaagaggcccggcagtaccggcataaccaagcctatgcctacagcatccagggtgacggtgccgaggatgacgatgagcgcattgttagatttcatacacggtgcctgactgcgttagcaatttaactgtgataaactaccgcattaaagctagctt

SEQ ID NO: 5561 - DNA, 9046 bp, Artificial Sequence
  Description of Artificial Sequence: Synthetic polynucleotide
  modified_base (5258)..(5263): a, c, t, g, unknown or other
ccgggcaggagcgtgaccgggctgccataactgaacgggaagccgcgctgccggagggtgtactgcgtgaacctcaacgggtgcgggaagctgtcagggaaattgcccgggaaaatctgctgcaggagcgacttcagcagatggagcgggatatggtccgcgacctgcagaaagagaaaaccctgggtggagactgatacaggaagacaaacgctgatgacaacggataacacgaacacgacacgtaacgattcactggttgcccggaccgatacctggttgcagtcgttgctggtctggtcacccggacagcgggatatcatcaaaacggtggcactggtgctgatggttctggaccatgcaaaccgtattctgcatctggaccagtcgtggatgtttctagccgggcgcggggcctttccgctgtttgccctggtgtgggggctgaatctgtcccgtcatgcgcatatccggcaactggccattaaccggctgtggggatgggcagttttttcccagttctggtattactttgccggctttccctggtatgaggggaatatcctgtttgcctttgcagtggcggcacaggtgctgacatggtgtgaaacgcgcagtgggtggcgtactgcagcggccattctcatgatggcactgtgggggcctttgtccggcaccagttacggcattgccgggctgctgatgctggctgtcagccaccggctgtaccgggcggaagacagaatggaacgtctggtgcttgtcgcttgcctgctggccgtgattccggcgcttaaccttgccaccagtgatgcggcggctgtagccggccttgtgatgacggtgctgaccgttggtctggtgtcgtgtgcagggaaattattatcccgtttctggcccggagactttttcccgacgttctatgcctgtcatctggctgtgctgggcgttctggcgctgtgacgggtgtggtatctttggccgcaagaggatgattcgtgagacccacgatttgtaataacagagtgtcttgtatttttaaagaaagtctatttaatacaagtgattatattaattaacggtaagcatcagcgggtgacaaaacgagcatgcttactaataaaatgttaacctctgaggaagaattgtgaaactatcactaatggtagctatatcgaagaatggagttatcgggaatggccctgatattccatggagtgccaaaggtgaacagctcctgtttaaagctattacctataaccaatggctgttggttggacgcaagacttttgaatcaatgggagcattacccaaccgaaagtatgcggtcgtaacacgttcaagttttacatctgacaatgagaacgtattgatctttccatcaattaaagatgctttaaccaacctaaagaaaataacggatcatgtcattgtttcaggtggtggggagatatacaaaagcctgatcgatcaagtagatacactacatatatctacaatagacatcgagccggaaggtgatgtttactttcctgaaatccccagcaattttaggccagtttttacccaagacttcgcctctaacataaattatagttaccaaatctggcaaaagggttaacaagtggcagcaacggattcgcaaacctgtcacgccttttgtgccaaaagccgcgccaggtttgcgatccgctgtgccaggcgttaggcgtcatatgaagatttcggtgatccctgagcaggtctcccttgcgctcgttcgccagccaggacagaaatgcctcgacttcgctgctgcccaaggttgccgggtgacgcacaccgtggaaacggatgaaggcacgaacccagtggacataagcctgttcggttcgtaagctgtaatgcaagtagcgtatgcgctcacgcaactggtccagaaccttgaccgaacgcagcggtggtaacggcgcagtggcggttttcatggcttgttatgactgtttttttggggtacagtctatgcctcgggcatccaagcagcaagcgcgttacgccgtgggtcgatgtttgatgttatggagcagcaacgatgttacgcagcagggcagtcgccctaaaacaaagttaaacatcatgagggaagcggtgatcgccgaagtatcgactcaactatcagaggtagttggcgtcatcgagcgccatctcgaaccgacgttgctggccgtacatttgtacggctccgcagtggatggcggcctgaagccacacagtgatattgatttgctggttacggtgaccgtaaggcttgatgaaacaacgcggcgagctttgatcaacgaccttttggaaacttcggcttcccctggagagagcgagattctccgcgctgtagaagtcaccattgttgtgcacgacgacatcattccgtggcgttatccagctaagcgcgaactgcaatttggagaatggcagcgcaatgacattcttgcaggtatcttcgagccagccacgatcgacattgatctggctatcttgctgacaaaagcaagagaacatagcgttgccttggtaggtccagcggcggaggaactctttgatccggttcctgaacaggatctatttgaggcgctaaatgaaaccttaacgctatggaactcgccgcccgactgggctggcgatgagcgaaatgtagtgcttacgttgtcccgcatttggtacagcgcagtaaccggcaaaatcgcgccgaaggatgtcgctgccgactgggcaatggagcgcctgccggcccagtatcagcccgtcatacttgaagctagacaggcttatcttggacaagaagaagatcgcttggcctcgcgcgcagatcagttggaagaatttgtccactacgtgaaaggcgagatcaccaaggtagtcggcaaataatgtctaacaattcgttcaagccgacgccgcttcgcggcgcggcttaactcaagagaggaagagtaaggatggaacgggatatattttctgcgatattaccgaaaccgtatcgatcctcaggtacatcttcaactgccgcatcaagccctttctggttccacagctgcctcagtatcttcatattacagatctccgtacaggcagcgcagcccggtcagggcctccgccagcgggccttcttgacaccgcgtggcgagctcccggaccagcgtctcaaaggcctccgccggcataaaaatccgcaggccgtctatcccgaagaagccctccggcgtgacgtttccgggcggggagaacatcactcgctccccctggtgaccgtgcgtcagggcttccggatgccgggcatacagcgtgaacaggcccagcagttcggataacgcttcccagccgtacggcaccacgaagtcctggccggtgatcagcaggtgcagacggggtgtggtgtaccaggcccccgggcgttctccggggtgctggccgtcaacgcggatctccaggcgcagcgtgccggcctcaatggtttccgtgacggcagaaataaccgggcgcagctcctgtgccagcgttcttgcctgttctgtgttccagtccaggccgcgcagcatcaacgggaaaacagctttcagccgcggcagggtgaagatttctgccagcaccgcgtccggcacctccgccaggccaaaacagtcgctctcgagcggacgcaggaggtgttcggcatacatctgatccaccacggggcgcagcgctgcccggaaggcttcaaactcttccgtccagtttttcccggccaggcggaaaatccccttcaggtagtgaccgtccacagggcgatcgtgctccacctgccaggccagcaggttgccagtgatgtccagcagcgtgtccagggccgggagtgtggccagcctattatgcccgcgcaggaaggcctccctgacgtgaaccaggacaaagcgcagttcgtcgcgggagagcgctgacgtgccgatcaagcttatcgataccgtcgacctcgagggggggcccggtacccaattcgccctatagtgagtcgtattacgcgcgctcactggccgtcgttttacaacgtcgtgactgggaaaaccctggcgttacccaacttaatcgccttgcagcacatccccctttcgccagctggcgtaatagcgaagaggcccgcaccgatcgcccttcccaacagttgcgcagcctgaatggcgaatgggacgcgccctgtagcggcgcattaagcgcggcgggtgtggtggttacgcgcagcgtgaccgctacacttgccagcgccctagcgcccgctcctttcgctttcttcccttcctttctcgccacgttcgccggctttccccgtcaagctctaaatcgggggctccctttagggttccgatttagtgctttacggcacctcgaccccaaaaaacttgattagggtgatggttcacgtagtgggccatcgccctgatagacggtttttcgccctttgacgttggagtccacgttctttaatagtggactcttgttccaaactggaacaacactcaaccctatctcggtctattcttttgatttataagggattttgccgatttcggcctattggttaaaaaatgagctgatttaacaaaaatttaacgcgaattttaacaaaatattaacgcttacaatttaggtggcacttttcggggaaatgtgcgcggaacccctatttgtttatttttctaaatacattcaaatatgtatccgctcatgagattatcaaaaaggatcttcacctagatccttttggcgtagcaccaggcgtttaagggcaccaataactgccttaaaaaaacgccccgccctgccactcatcgcagtactgttgtaattcattaagcattctgccgacatggaagccatcacaaacggcatgatgaacctgaatcgccagcggcatcagcaccttgtcgccttgcgtataatatttgcccatggtgaaaacgggggcgaagaagttgtccatattggccacgtttaaatcaaaactggtgaaactcacccagggattggctgagacgaaaaacatattctcaataaaccctttagggaaataggccaggttttcaccgtaacacgccacatcttgcgaatatatgtgtagaaactgccggaaatcgtcgtggtattcactccagagcgatgaaaacgtttcagtttgctcatggaaaacggtgtaacaagggtgaacactatcccatatcaccagctcaccgtctttcattgccatacgnnnnnncggatgagcattcatcaggcgggcaagaatgtgaataaaggccggataaaacttgtgcttatttttctttacggtctttaaaaaggccgtaatatccagctgaacggtctggttataggtacattgagcaactgactgaaatgcctcaaaatgttctttacgatgccattgggatatatcaacggtggtatatccagtgatttttttctccattttagcttccttagctcctgaaaatctcgataactcaaaaaatacgcccggtagtgatcttatttcattatggtgaaagttggaacctcttacattattgaagcatttatcagggttattgtctcatgaccaaaatcccttaacgtgagttttcgttccactgagcgtcagatccgacagtaagacgggtaagcctgttgatgataccgctgccttactgggtgcattagccagtctgaatgacctgtcacgggataatccgaagtggtcagactggaaaatcagagggcaggaactgctgaacagcaaaaagtcagatagcaccacatagcagacccgccataaaacgccctgagaagcccgtgacgggcttttcttgtattatgggtagtttccttgcatgaatccataaaaggcgcctgtagtgccatttacccccattcactgccagagccgtgagcgcagcgaactgaatgtcacgaaaaagacagcgactcaggtgcctgatggtcggagcaaaaggaatattcagcgatttgcccgagcttgcgagggtgctacttaagcctttagggttttaaggtctgttttgtagaggagcaaacagcgtttgcgacatccttttgtaatactgcggaactgactaaagtagtgagttatacacagggctgggatctattctttttatctttttttattctttctttattctataaattataaccacttgaatataaacaaaaaaaacacacaaaggtctagcggaatttacagagggtctagcagaatttacaagttttccagcaaaggtctagcagaatttacagatacccacaactcaaaggaaaaggactagtaattatcattgactagcccatctcaattggtatagtgattaaaatcacctagaccaattgagatgtatgtctgaattagttgttttcaaagcaaatgaactagcgattagtcgctatgacttaacggagcatgaaaccaagctaattttatgctgtgtggcactactcaaccccacgattgaaaaccctacaaggaaagaacggacggtatcgttcacttataaccaatacgctcagatgatgaacatcagtagggaaaatgcttatggtgtattagctaaagcaaccagagagctgatgacgagaactgtggaaatcaggaatcctttggttaaaggctttgagattttccagtggacaaactatgccaagttctcaagcgaaaaattagaattagtttttagtgaagagatattgccttatcttttccagttaaaaaaattcataaaatataatctggaacatgttaagtcttttgaaaacaaatactctatgaggatttatgagtggttattaaaagaactaacacaaaagaaaactcacaaggcaaatatagagattagccttgatgaatttaagttcatgttaatgcttgaaaataactaccatgagtttaaaaggcttaaccaatgggttttgaaaccaataagtaaagatttaaacacttacagcaatatgaaattggtggttgataagcgaggccgcccgactgatacgttgattttccaagttgaactagatagacaaatggatctcgtaaccgaacttgagaacaaccagataaaaatgaatggtgacaaaataccaacaaccattacatcagattcctacctacgtaacggactaagaaaaacactacacgatgctttaactgcaaaaattcagctcaccagttttgaggcaaaatttttgagtgacatgcaaagtaagcatgatctcaatggttcgttctcatggctcacgcaaaaacaacgaaccacactagagaacatactggctaaatacggaaggatctgaggttcttatggctcttgtatctatcagtgaagcatcaagactaacaaacaaaagtagaacaactgttcaccgttacatatcaaagggaaaactgtccatatgcacagatgaaaacggtgtaaaaaagatagatacatcagagcttttacgagtttttggtgcatttaaagctgttcaccatgaacagatcgacaatgtaacagatgaacagcatgtaacacctaatagaacaggtgaaaccagtaaaacaaagcaactagaacatgaaattgaacacctgagacaacttgttacagctcaacagtcacacatagacagcctgaaacaggcgatgctgcttatcgaatcaaagctgccgacaacacgggagccagtgacgcctcccgtggggaaaaaatcatggcaattctggaagaaatagcgctttcagccggcaaacctgaagccggatctgcgattctgataacaaactagcaacaccagaacagcccgtttgcgggcagcaaaacccgtacttttggacgttccggcggttttttgtggcgagtggtgttcgggcggtgcgcgcaagatccattatgttaaacgggcgagtttacatctcaaaaccgcccgcttaacaccatcagaaatcctcagcgcgattttaagcaccaacccccccccgtaacacccaaatccatactgaaagtggctttgttgaataaatcgaacttttgctgagttgaaggatcagatcacgcatcctcccgacaacacagaccattccgtggcaaagcaaaagttcagaatcaccaactggtccacctacaacaaagctctcatcaaccgtggctccctcactttctggctggatgatgaggcgattcaggcctggtatgagtcggcaacaccttcatcacgaggaaggccccagcgctattctgatctcgccatcaccaccgttctggtgattaaacgcgtattccggctgaccctgcgggctgcgcagggttttattgattccatttttgccctgatgaacgttccgttgcgctgcccggattacaccagtgtcagtaagcgggcaaagtcggttaatgtcagtttcaaaacgtccacccggggtgaaatcgcacacctggtgattgattccaccgggctgaaggtctttggtgaaggcgaatggaaagtcagaaagcacggcaaagagcgccgtcgtatctggcgaaagttgcatcttgctgttggatctcacatgttctttcctgcgttatcccctgattctgtggataaccgtattaccgcctttgagtgagctgataccgctcgccgcagccgaacgaccgagcgcagcgagtcagtgagcgaggaagcggaagagcgcccaatacgcaaaccgcctctccccgcgcgttggccgattcattaatgcagctggcacgacaggtttcccgactggaaagcgggcagtgagcgcaacgcaattaatgtgagttagctcactcattaggcaccccaggctttacactttatgcttccggctcgtatgttgtgtggaattgtgagcggataacaatttcacacaggaaacagctatgaccatgattacgccaagcgcgcaattaaccctcactaaagggaacaaaagctggagctccaccgcggtggcggccgctctagaactagtggatcccccgggctgcaggaattcgat

SEQ ID NO: 5562 - DNA, 11607 bp, Artificial Sequence
  Description of Artificial Sequence: Synthetic polynucleotide
  modified_base (7819)..(7824): a, c, t, g, unknown or other
ccgggcaggagcgtgaccgggctgccataactgaacgggaagccgcgctgccggagggtgtactgcgtgaacctcaacgggtgcgggaagctgtcagggaaattgcccgggaaaatctgctgcaggagcgacttcagcagatggagcgggatatggtccgcgacctgcagaaagagaaaaccctgggtggagactgatacaggaagacaaacgctgatgacaacggataacacgaacacgacacgtaacgattcactggttgcccggaccgatacctggttgcagtcgttgctggtctggtcacccggacagcgggatatcatcaaaacggtggcactggtgctgatggttctggaccatgcaaaccgtattctgcatctggaccagtcgtggatgtttctagccgggcgcggggcctttccgctgtttgccctggtgtgggggctgaatctgtcccgtcatgcgcatatccggcaactggccattaaccggctgtggggatgggcagttttttcccagttctggtattactttgccggctttccctggtatgaggggaatatcctgtttgcctttgcagtggcggcacaggtgctgacatggtgtgaaacgcgcagtgggtggcgtactgcagcggccattctcatgatggcactgtgggggcctttgtccggcaccagttacggcattgccgggctgctgatgctggctgtcagccaccggctgtaccgggcggaagacagaatggaacgtctggtgcttgtcgcttgcctgctggccgtgattccggcgcttaaccttgccaccagtgatgcggcggctgtagccggccttgtgatgacggtgctgaccgttggtctggtgtcgtgtgcagggaaattattatcccgtttctggcccggagactttttcccgacgttctatgcctgtcatctggctgtgctgggcgttctggcgctgtgacgggtgtggtatctttggccgcaagaggatgattcgcccaatacgcaaaccgcctctccccgcgcgttggccgattcattaatgcagctggcacgacaggtttcccgactggaaagcgggcagtgagcgcaacgcaattaatgtgagttagctcactcattaggcaccccaggctttacactttatgcttccggctcgtatgttgtgtggaattgtgagcggataacaatttcacacaggaaacagctatgaccatgattacggattcactggccgtcgttttacaacgtcgtgactgggaaaaccctggcgttacccaacttaatcgccttgcagcacatccccctttcgccagctggcgtaatagcgaagaggcccgcaccgatcgcccttcccaacagttgcgcagcctgaatggcgaatggcgctttgcctggtttccggcaccagaagcggtgccggaaagctggctggagtgcgatcttcctgaggccgatactgtcgtcgtcccctcaaactggcagatgcacggttacgatgcgcccatctacaccaacgtgacctatcccattacggtcaatccgccgtttgttcccacggagaatccgacgggttgttactcgctcacatttaatgttgatgaaagctggctacaggaaggccagacgcgaattatttttgatggcgttaactcggcgtttcatctgtggtgcaacgggcgctgggtcggttacggccaggacagtcgtttgccgtctgaatttgacctgagcgcatttttacgcgccggagaaaaccgcctcgcggtgatggtgctgcgctggagtgacggcagttatctggaagatcaggatatgtggcggatgagcggcattttccgtgacgtctcgttgctgcataaaccgactacacaaatcagcgatttccatgttgccactcgctttaatgatgatttcagccgcgctgtactggaggctgaagttcagatgtgcggcgagttgcgtgactacctacgggtaacagtttctttatggcagggtgaaacgcaggtcgccagcggcaccgcgcctttcggcggtgaaattatcgatgagcgtggtggttatgccgatcgcgtcacactacgtctgaacgtcgaaaacccgaaactgtggagcgccgaaatcccgaatctctatcgtgcggtggttgaactgcacaccgccgacggcacgctgattgaagcagaagcctgcgatgtcggtttccgcgaggtgcggattgaaaatggtctgctgctgctgaacggcaagccgttgctgattcgaggcgttaaccgtcacgagcatcatcctctgcatggtcaggtcatggatgagcagacgatggtgcaggatatcctgctgatgaagcagaacaactttaacgccgtgcgctgttcgcattatccgaaccatccgctgtggtacacgctgtgcgaccgctacggcctgtatgtggtggatgaagccaatattgaaacccacggcatggtgccaatgaatcgtctgaccgatgatccgcgctggctaccggcgatgagcgaacgcgtaacgcgaatggtgcagcgcgatcgtaatcacccgagtgtgatcatctggtcgctggggaatgaatcaggccacggcgctaatcacgacgcgctgtatcgctggatcaaatctgtcgatccttcccgcccggtgcagtatgaaggcggcggagccgacaccacggccaccgatattatttgcccgatgtacgcgcgcgtggatgaagaccagcccttcccggctgtgccgaaatggtccatcaaaaaatggctttcgctacctggagagacgcgcccgctgatcctttgcgaatacgcccacgcgatgggtaacagtcttggcggtttcgctaaatactggcaggcgtttcgtcagtatccccgtttacagggcggcttcgtctgggactgggtggatcagtcgctgattaaatatgatgaaaacggcaacccgtggtcggcttacggcggtgattttggcgatacgccgaacgatcgccagttctgtatgaacggtctggtctttgccgaccgcacgccgcatccagcgctgacggaagcaaaacaccagcagcagtttttccagttccgtttatccgggcaaaccatcgaagtgaccagcgaatacctgttccgtcatagcgataacgagctcctgcactggatggtggcgctggatggtaagccgctggcaagcggtgaagtgcctctggatgtcgctccacaaggtaaacagttgattgaactgcctgaactaccgcagccggagagcgccgggcaactctggctcacagtacgcgtagtgcaaccgaacgcgaccgcatggtcagaagccgggcacatcagcgcctggcagcagtggcgtctggcggaaaacctcagtgtgacgctccccgccgcgtcccacgccatcccgcatctgaccaccagcgaaatggatttttgcatcgagctgggtaataagcgttggcaatttaaccgccagtcaggctttctttcacagatgtggattggcgataaaaaacaactgctgacgccgctgcgcgatcagttcacccgtgcaccgctggataacgacattggcgtaagtgaagcgacccgcattgaccctaacgcctgggtcgaacgctggaaggcggcgggccattaccaggccgaagcagcgttgttgcagtgcacggcagatacacttgctgatgcggtgctgattacgaccgctcacgcgtggcagcatcaggggaaaaccttatttatcagccggaaaacctaccggattgatggtagtggtcaaatggcgattaccgttgatgttgaagtggcgagcgatacaccgcatccggcgcggattggcctgaactgccagctggcgcaggtagcagagcgggtaaactggctcggattagggccgcaagaaaactatcccgaccgccttactgccgcctgttttgaccgctgggatctgccattgtcagacatgtataccccgtacgtcttcccgagcgaaaacggtctgcgctgcgggacgcgcgaattgaattatggcccacaccagtggcgcggcgacttccagttcaacatcagccgctacagtcaacagcaactgatggaaaccagccatcgccatctgctgcacgcggaagaaggcacatggctgaatatcgacggtttccatatggggattggtggcgacgactcctggagcccgtcagtatcggcggaattccagctgagcgccggtcgctaccattaccagttggtctggtgtcaaaaataataataaccgggcaggccatgtctcttgcgctcgttcgccagccaggacagaaatgcctcgacttcgctgctgcccaaggttgccgggtgacgcacaccgtggaaacggatgaaggcacgaacccagtggacataagcctgttcggttcgtaagctgtaatgcaagtagcgtatgcgctcacgcaactggtccagaaccttgaccgaacgcagcggtggtaacggcgcagtggcggttttcatggcttgttatgactgtttttttggggtacagtctatgcctcgggcatccaagcagcaagcgcgttacgccgtgggtcgatgtttgatgttatggagcagcaacgatgttacgcagcagggcagtcgccctaaaacaaagttaaacatcatgagggaagcggtgatcgccgaagtatcgactcaactatcagaggtagttggcgtcatcgagcgccatctcgaaccgacgttgctggccgtacatttgtacggctccgcagtggatggcggcctgaagccacacagtgatattgatttgctggttacggtgaccgtaaggcttgatgaaacaacgcggcgagctttgatcaacgaccttttggaaacttcggcttcccctggagagagcgagattctccgcgctgtagaagtcaccattgttgtgcacgacgacatcattccgtggcgttatccagctaagcgcgaactgcaatttggagaatggcagcgcaatgacattcttgcaggtatcttcgagccagccacgatcgacattgatctggctatcttgctgacaaaagcaagagaacatagcgttgccttggtaggtccagcggcggaggaactctttgatccggttcctgaacaggatctatttgaggcgctaaatgaaaccttaacgctatggaactcgccgcccgactgggctggcgatgagcgaaatgtagtgcttacgttgtcccgcatttggtacagcgcagtaaccggcaaaatcgcgccgaaggatgtcgctgccgactgggcaatggagcgcctgccggcccagtatcagcccgtcatacttgaagctagacaggcttatcttggacaagaagaagatcgcttggcctcgcgcgcagatcagttggaagaatttgtccactacgtgaaaggcgagatcaccaaggtagtcggcaaataatgtctaacaattcgttcaagccgacgccgcttcgcggcgcggcttaactcaagagaggaagagtaaggatggaacgggatatattttctgcgatattaccgaaaccgtatcgatcctcaggtacatcttcaactgccgcatcaagccctttctggttccacagctgcctcagtatcttcatattacagatctccgtacaggcagcgcagcccggtcagggcctccgccagcgggccttcttgacaccgcgtggcgagctcccggaccagcgtctcaaaggcctccgccggcataaaaatccgcaggccgtctatcccgaagaagccctccggcgtgacgtttccgggcggggagaacatcactcgctccccctggtgaccgtgcgtcagggcttccggatgccgggcatacagcgtgaacaggcccagcagttcggataacgcttcccagccgtacggcaccacgaagtcctggccggtgatcagcaggtgcagacggggtgtggtgtaccaggcccccgggcgttctccggggtgctggccgtcaacgcggatctccaggcgcagcgtgccggcctcaatggtttccgtgacggcagaaataaccgggcgcagctcctgtgccagcgttcttgcctgttctgtgttccagtccaggccgcgcagcatcaacgggaaaacagctttcagccgcggcagggtgaagatttctgccagcaccgcgtccggcacctccgccaggccaaaacagtcgctctcgagcggacgcaggaggtgttcggcatacatctgatccaccacggggcgcagcgctgcccggaaggcttcaaactcttccgtccagtttttcccggccaggcggaaaatccccttcaggtagtgaccgtccacagggcgatcgtgctccacctgccaggccagcaggttgccagtgatgtccagcagcgtgtccagggccgggagtgtggccagcctattatgcccgcgcaggaaggcctccctgacgtgaaccaggacaaagcgcagttcgtcgcgggagagcgctgacgtgccgatcaagcttatcgataccgtcgacctcgagggggggcccggtacccaattcgccctatagtgagtcgtattacgcgcgctcactggccgtcgttttacaacgtcgtgactgggaaaaccctggcgttacccaacttaatcgccttgcagcacatccccctttcgccagctggcgtaatagcgaagaggcccgcaccgatcgcccttcccaacagttgcgcagcctgaatggcgaatgggacgcgccctgtagcggcgcattaagcgcggcgggtgtggtggttacgcgcagcgtgaccgctacacttgccagcgccctagcgcccgctcctttcgctttcttcccttcctttctcgccacgttcgccggctttccccgtcaagctctaaatcgggggctccctttagggttccgatttagtgctttacggcacctcgaccccaaaaaacttgattagggtgatggttcacgtagtgggccatcgccctgatagacggtttttcgccctttgacgttggagtccacgttctttaatagtggactcttgttccaaactggaacaacactcaaccctatctcggtctattcttttgatttataagggattttgccgatttcggcctattggttaaaaaatgagctgatttaacaaaaatttaacgcgaattttaacaaaatattaacgcttacaatttaggtggcacttttcggggaaatgtgcgcggaacccctatttgtttatttttctaaatacattcaaatatgtatccgctcatgagattatcaaaaaggatcttcacctagatccttttggcgtagcaccaggcgtttaagggcaccaataactgccttaaaaaaacgccccgccctgccactcatcgcagtactgttgtaattcattaagcattctgccgacatggaagccatcacaaacggcatgatgaacctgaatcgccagcggcatcagcaccttgtcgccttgcgtataatatttgcccatggtgaaaacgggggcgaagaagttgtccatattggccacgtttaaatcaaaactggtgaaactcacccagggattggctgagacgaaaaacatattctcaataaaccctttagggaaataggccaggttttcaccgtaacacgccacatcttgcgaatatatgtgtagaaactgccggaaatcgtcgtggtattcactccagagcgatgaaaacgtttcagtttgctcatggaaaacggtgtaacaagggtgaacactatcccatatcaccagctcaccgtctttcattgccatacgnnnnnncggatgagcattcatcaggcgggcaagaatgtgaataaaggccggataaaacttgtgcttatttttctttacggtctttaaaaaggccgtaatatccagctgaacggtctggttataggtacattgagcaactgactgaaatgcctcaaaatgttctttacgatgccattgggatatatcaacggtggtatatccagtgatttttttctccattttagcttccttagctcctgaaaatctcgataactcaaaaaatacgcccggtagtgatcttatttcattatggtgaaagttggaacctcttacattattgaagcatttatcagggttattgtctcatgaccaaaatcccttaacgtgagttttcgttccactgagcgtcagatccgacagtaagacgggtaagcctgttgatgataccgctgccttactgggtgcattagccagtctgaatgacctgtcacgggataatccgaagtggtcagactggaaaatcagagggcaggaactgctgaacagcaaaaagtcagatagcaccacatagcagacccgccataaaacgccctgagaagcccgtgacgggcttttcttgtattatgggtagtttccttgcatgaatccataaaaggcgcctgtagtgccatttacccccattcactgccagagccgtgagcgcagcgaactgaatgtcacgaaaaagacagcgactcaggtgcctgatggtcggagcaaaaggaatattcagcgatttgcccgagcttgcgagggtgctacttaagcctttagggttttaaggtctgttttgtagaggagcaaacagcgtttgcgacatccttttgtaatactgcggaactgactaaagtagtgagttatacacagggctgggatctattctttttatctttttttattctttctttattctataaattataaccacttgaatataaacaaaaaaaacacacaaaggtctagcggaatttacagagggtctagcagaatttacaagttttccagcaaaggtctagcagaatttacagatacccacaactcaaaggaaaaggactagtaattatcattgactagcccatctcaattggtatagtgattaaaatcacctagaccaattgagatgtatgtctgaattagttgttttcaaagcaaatgaactagcgattagtcgctatgacttaacggagcatgaaaccaagctaattttatgctgtgtggcactactcaaccccacgattgaaaaccctacaaggaaagaacggacggtatcgttcacttataaccaatacgctcagatgatgaacatcagtagggaaaatgcttatggtgtattagctaaagcaaccagagagctgatgacgagaactgtggaaatcaggaatcctttggttaaaggctttgagattttccagtggacaaactatgccaagttctcaagcgaaaaattagaattagtttttagtgaagagatattgccttatcttttccagttaaaaaaattcataaaatataatctggaacatgttaagtcttttgaaaacaaatactctatgaggatttatgagtggttattaaaagaactaacacaaaagaaaactcacaaggcaaatatagagattagccttgatgaatttaagttcatgttaatgcttgaaaataactaccatgagtttaaaaggcttaaccaatgggttttgaaaccaataagtaaagatttaaacacttacagcaatatgaaattggtggttgataagcgaggccgcccgactgatacgttgattttccaagttgaactagatagacaaatggatctcgtaaccgaacttgagaacaaccagataaaaatgaatggtgacaaaataccaacaaccattacatcagattcctacctacgtaacggactaagaaaaacactacacgatgctttaactgcaaaaattcagctcaccagttttgaggcaaaatttttgagtgacatgcaaagtaagcatgatctcaatggttcgttctcatggctcacgcaaaaacaacgaaccacactagagaacatactggctaaatacggaaggatctgaggttcttatggctcttgtatctatcagtgaagcatcaagactaacaaacaaaagtagaacaactgttcaccgttacatatcaaagggaaaactgtccatatgcacagatgaaaacggtgtaaaaaagatagatacatcagagcttttacgagtttttggtgcatttaaagctgttcaccatgaacagatcgacaatgtaacagatgaacagcatgtaacacctaatagaacaggtgaaaccagtaaaacaaagcaactagaacatgaaattgaacacctgagacaacttgttacagctcaacagtcacacatagacagcctgaaacaggcgatgctgcttatcgaatcaaagctgccgacaacacgggagccagtgacgcctcccgtggggaaaaaatcatggcaattctggaagaaatagcgctttcagccggcaaacctgaagccggatctgcgattctgataacaaactagcaacaccagaacagcccgtttgcgggcagcaaaacccgtacttttggacgttccggcggttttttgtggcgagtggtgttcgggcggtgcgcgcaagatccattatgttaaacgggcgagtttacatctcaaaaccgcccgcttaacaccatcagaaatcctcagcgcgattttaagcaccaacccccccccgtaacacccaaatccatactgaaagtggctttgttgaataaatcgaacttttgctgagttgaaggatcagatcacgcatcctcccgacaacacagaccattccgtggcaaagcaaaagttcagaatcaccaactggtccacctacaacaaagctctcatcaaccgtggctccctcactttctggctggatgatgaggcgattcaggcctggtatgagtcggcaacaccttcatcacgaggaaggccccagcgctattctgatctcgccatcaccaccgttctggtgattaaacgcgtattccggctgaccctgcgggctgcgcagggttttattgattccatttttgccctgatgaacgttccgttgcgctgcccggattacaccagtgtcagtaagcgggcaaagtcggttaatgtcagtttcaaaacgtccacccggggtgaaatcgcacacctggtgattgattccaccgggctgaaggtctttggtgaaggcgaatggaaagtcagaaagcacggcaaagagcgccgtcgtatctggcgaaagttgcatcttgctgttggatctcacatgttctttcctgcgttatcccctgattctgtggataaccgtattaccgcctttgagtgagctgataccgctcgccgcagccgaacgaccgagcgcagcgagtcagtgagcgaggaagcggaagagcgcccaatacgcaaaccgcctctccccgcgcgttggccgattcattaatgcagctggcacgacaggtttcccgactggaaagcgggcagtgagcgcaacgcaattaatgtgagttagctcactcattaggcaccccaggctttacactttatgcttccggctcgtatgttgtgtggaattgtgagcggataacaatttcacacaggaaacagctatgaccatgattacgccaagcgcgcaattaaccctcactaaagggaacaaaagctggagctccaccgcggtggcggccgctctagaactagtggatcccccgggctgcaggaattcgat

SEQ ID NO: 5563 - DNA, 8349 bp, Artificial Sequence
  Description of Artificial Sequence: Synthetic polynucleotide
  modified_base (4561)..(4566): a, c, t, g, unknown or other
ccgggcaggagcgtgaccgggctgccataactgaacgggaagccgcgctgccggagggtgtactgcgtgaacctcaacgggtgcgggaagctgtcagggaaattgcccgggaaaatctgctgcaggagcgacttcagcagatggagcgggatatggtccgcgacctgcagaaagagaaaaccctgggtggagactgatacaggaagacaaacgctgatgacaacggataacacgaacacgacacgtaacgattcactggttgcccggaccgatacctggttgcagtcgttgctggtctggtcacccggacagcgggatatcatcaaaacggtggcactggtgctgatggttctggaccatgcaaaccgtattctgcatctggaccagtcgtggatgtttctagccgggcgcggggcctttccgctgtttgccctggtgtgggggctgaatctgtcccgtcatgcgcatatccggcaactggccattaaccggctgtggggatgggcagttttttcccagttctggtattactttgccggctttccctggtatgaggggaatatcctgtttgcctttgcagtggcggcacaggtgctgacatggtgtgaaacgcgcagtgggtggcgtactgcagcggccattctcatgatggcactgtgggggcctttgtccggcaccagttacggcattgccgggctgctgatgctggctgtcagccaccggctgtaccgggcggaagacagaatggaacgtctggtgcttgtcgcttgcctgctggccgtgattccggcgcttaaccttgccaccagtgatgcggcggctgtagccggccttgtgatgacggtgctgaccgttggtctggtgtcgtgtgcagggaaattattatcccgtttctggcccggagactttttcccgacgttctatgcctgtcatctggctgtgctgggcgttctggcgctgtgacgggtgtggtatctttggccgcaagaggatgattcgggtgcttacccggaaggggagggcaccctgcttattgataatcaggaggccccttgcgctcgttcgccagccaggacagaaatgcctcgacttcgctgctgcccaaggttgccgggtgacgcacaccgtggaaacggatgaaggcacgaacccagtggacataagcctgttcggttcgtaagctgtaatgcaagtagcgtatgcgctcacgcaactggtccagaaccttgaccgaacgcagcggtggtaacggcgcagtggcggttttcatggcttgttatgactgtttttttggggtacagtctatgcctcgggcatccaagcagcaagcgcgttacgccgtgggtcgatgtttgatgttatggagcagcaacgatgttacgcagcagggcagtcgccctaaaacaaagttaaacatcatgagggaagcggtgatcgccgaagtatcgactcaactatcagaggtagttggcgtcatcgagcgccatctcgaaccgacgttgctggccgtacatttgtacggctccgcagtggatggcggcctgaagccacacagtgatattgatttgctggttacggtgaccgtaaggcttgatgaaacaacgcggcgagctttgatcaacgaccttttggaaacttcggcttcccctggagagagcgagattctccgcgctgtagaagtcaccattgttgtgcacgacgacatcattccgtggcgttatccagctaagcgcgaactgcaatttggagaatggcagcgcaatgacattcttgcaggtatcttcgagccagccacgatcgacattgatctggctatcttgctgacaaaagcaagagaacatagcgttgccttggtaggtccagcggcggaggaactctttgatccggttcctgaacaggatctatttgaggcgctaaatgaaaccttaacgctatggaactcgccgcccgactgggctggcgatgagcgaaatgtagtgcttacgttgtcccgcatttggtacagcgcagtaaccggcaaaatcgcgccgaaggatgtcgctgccgactgggcaatggagcgcctgccggcccagtatcagcccgtcatacttgaagctagacaggcttatcttggacaagaagaagatcgcttggcctcgcgcgcagatcagttggaagaatttgtccactacgtgaaaggcgagatcaccaaggtagtcggcaaataatgtctaacaattcgttcaagccgacgccgcttcgcggcgcggcttaactcaagagaggaagagtaaggatggaacgggatatattttctgcgatattaccgaaaccgtatcgatcctcaggtacatcttcaactgccgcatcaagccctttctggttccacagctgcctcagtatcttcatattacagatctccgtacaggcagcgcagcccggtcagggcctccgccagcgggccttcttgacaccgcgtggcgagctcccggaccagcgtctcaaaggcctccgccggcataaaaatccgcaggccgtctatcccgaagaagccctccggcgtgacgtttccgggcggggagaacatcactcgctccccctggtgaccgtgcgtcagggcttccggatgccgggcatacagcgtgaacaggcccagcagttcggataacgcttcccagccgtacggcaccacgaagtcctggccggtgatcagcaggtgcagacggggtgtggtgtaccaggcccccgggcgttctccggggtgctggccgtcaacgcggatctccaggcgcagcgtgccggcctcaatggtttccgtgacggcagaaataaccgggcgcagctcctgtgccagcgttcttgcctgttctgtgttccagtccaggccgcgcagcatcaacgggaaaacagctttcagccgcggcagggtgaagatttctgccagcaccgcgtccggcacctccgccaggccaaaacagtcgctctcgagcggacgcaggaggtgttcggcatacatctgatccaccacggggcgcagcgctgcccggaaggcttcaaactcttccgtccagtttttcccggccaggcggaaaatccccttcaggtagtgaccgtccacagggcgatcgtgctccacctgccaggccagcaggttgccagtgatgtccagcagcgtgtccagggccgggagtgtggccagcctattatgcccgcgcaggaaggcctccctgacgtgaaccaggacaaagcgcagttcgtcgcgggagagcgctgacgtgccgatcaagcttatcgataccgtcgacctcgagggggggcccggtacccaattcgccctatagtgagtcgtattacgcgcgctcactggccgtcgttttacaacgtcgtgactgggaaaaccctggcgttacccaacttaatcgccttgcagcacatccccctttcgccagctggcgtaatagcgaagaggcccgcaccgatcgcccttcccaacagttgcgcagcctgaatggcgaatgggacgcgccctgtagcggcgcattaagcgcggcgggtgtggtggttacgcgcagcgtgaccgctacacttgccagcgccctagcgcccgctcctttcgctttcttcccttcctttctcgccacgttcgccggctttccccgtcaagctctaaatcgggggctccctttagggttccgatttagtgctttacggcacctcgaccccaaaaaacttgattagggtgatggttcacgtagtgggccatcgccctgatagacggtttttcgccctttgacgttggagtccacgttctttaatagtggactcttgttccaaactggaacaacactcaaccctatctcggtctattcttttgatttataagggattttgccgatttcggcctattggttaaaaaatgagctgatttaacaaaaatttaacgcgaattttaacaaaatattaacgcttacaatttaggtggcacttttcggggaaatgtgcgcggaacccctatttgtttatttttctaaatacattcaaatatgtatccgctcatgagattatcaaaaaggatcttcacctagatccttttggcgtagcaccaggcgtttaagggcaccaataactgccttaaaaaaacgccccgccctgccactcatcgcagtactgttgtaattcattaagcattctgccgacatggaagccatcacaaacggcatgatgaacctgaatcgccagcggcatcagcaccttgtcgccttgcgtataatatttgcccatggtgaaaacgggggcgaagaagttgtccatattggccacgtttaaatcaaaactggtgaaactcacccagggattggctgagacgaaaaacatattctcaataaaccctttagggaaataggccaggttttcaccgtaacacgccacatcttgcgaatatatgtgtagaaactgccggaaatcgtcgtggtattcactccagagcgatgaaaacgtttcagtttgctcatggaaaacggtgtaacaagggtgaacactatcccatatcaccagctcaccgtctttcattgccatacgnnnnnncggatgagcattcatcaggcgggcaagaatgtgaataaaggccggataaaacttgtgcttatttttctttacggtctttaaaaaggccgtaatatccagctgaacggtctggttataggtacattgagcaactgactgaaatgcctcaaaatgttctttacgatgccattgggatatatcaacggtggtatatccagtgatttttttctccattttagcttccttagctcctgaaaatctcgataactcaaaaaatacgcccggtagtgatcttatttcattatggtgaaagttggaacctcttacattattgaagcatttatcagggttattgtctcatgaccaaaatcccttaacgtgagttttcgttccactgagcgtcagatccgacagtaagacgggtaagcctgttgatgataccgctgccttactgggtgcattagccagtctgaatgacctgtcacgggataatccgaagtggtcagactggaaaatcagagggcaggaactgctgaacagcaaaaagtcagatagcaccacatagcagacccgccataaaacgccctgagaagcccgtgacgggcttttcttgtattatgggtagtttccttgcatgaatccataaaaggcgcctgtagtgccatttacccccattcactgccagagccgtgagcgcagcgaactgaatgtcacgaaaaagacagcgactcaggtgcctgatggtcggagcaaaaggaatattcagcgatttgcccgagcttgcgagggtgctacttaagcctttagggttttaaggtctgttttgtagaggagcaaacagcgtttgcgacatccttttgtaatactgcggaactgactaaagtagtgagttatacacagggctgggatctattctttttatctttttttattctttctttattctataaattataaccacttgaatataaacaaaaaaaacacacaaaggtctagcggaatttacagagggtctagcagaatttacaagttttccagcaaaggtctagcagaatttacagatacccacaactcaaaggaaaaggactagtaattatcattgactagcccatctcaattggtatagtgattaaaatcacctagaccaattgagatgtatgtctgaattagttgttttcaaagcaaatgaactagcgattagtcgctatgacttaacggagcatgaaaccaagctaattttatgctgtgtggcactactcaaccccacgattgaaaaccctacaaggaaagaacggacggtatcgttcacttataaccaatacgctcagatgatgaacatcagtagggaaaatgcttatggtgtattagctaaagcaaccagagagctgatgacgagaactgtggaaatcaggaatcctttggttaaaggctttgagattttccagtggacaaactatgccaagttctcaagcgaaaaattagaattagtttttagtgaagagatattgccttatcttttccagttaaaaaaattcataaaatataatctggaacatgttaagtcttttgaaaacaaatactctatgaggatttatgagtggttattaaaagaactaacacaaaagaaaactcacaaggcaaatatagagattagccttgatgaatttaagttcatgttaatgcttgaaaataactaccatgagtttaaaaggcttaaccaatgggttttgaaaccaataagtaaagatttaaacacttacagcaatatgaaattggtggttgataagcgaggccgcccgactgatacgttgattttccaagttgaactagatagacaaatggatctcgtaaccgaacttgagaacaaccagataaaaatgaatggtgacaaaataccaacaaccattacatcagattcctacctacgtaacggactaagaaaaacactacacgatgctttaactgcaaaaattcagctcaccagttttgaggcaaaatttttgagtgacatgcaaagtaagcatgatctcaatggttcgttctcatggctcacgcaaaaacaacgaaccacactagagaacatactggctaaatacggaaggatctgaggttcttatggctcttgtatctatcagtgaagcatcaagactaacaaacaaaagtagaacaactgttcaccgttacatatcaaagggaaaactgtccatatgcacagatgaaaacggtgtaaaaaagatagatacatcagagcttttacgagtttttggtgcatttaaagctgttcaccatgaacagatcgacaatgtaacagatgaacagcatgtaacacctaatagaacaggtgaaaccagtaaaacaaagcaactagaacatgaaattgaacacctgagacaacttgttacagctcaacagtcacacatagacagcctgaaacaggcgatgctgcttatcgaatcaaagctgccgacaacacgggagccagtgacgcctcccgtggggaaaaaatcatggcaattctggaagaaatagcgctttcagccggcaaacctgaagccggatctgcgattctgataacaaactagcaacaccagaacagcccgtttgcgggcagcaaaacccgtacttttggacgttccggcggttttttgtggcgagtggtgttcgggcggtgcgcgcaagatccattatgttaaacgggcgagtttacatctcaaaaccgcccgcttaacaccatcagaaatcctcagcgcgattttaagcaccaacccccccccgtaacacccaaatccatactgaaagtggctttgttgaataaatcgaacttttgctgagttgaaggatcagatcacgcatcctcccgacaacacagaccattccgtggcaaagcaaaagttcagaatcaccaactggtccacctacaacaaagctctcatcaaccgtggctccctcactttctggctggatgatgaggcgattcaggcctggtatgagtcggcaacaccttcatcacgaggaaggccccagcgctattctgatctcgccatcaccaccgttctggtgattaaacgcgtattccggctgaccctgcgggctgcgcagggttttattgattccatttttgccctgatgaacgttccgttgcgctgcccggattacaccagtgtcagtaagcgggcaaagtcggttaatgtcagtttcaaaacgtccacccggggtgaaatcgcacacctggtgattgattccaccgggctgaaggtctttggtgaaggcgaatggaaagtcagaaagcacggcaaagagcgccgtcgtatctggcgaaagttgcatcttgctgttggatctcacatgttctttcctgcgttatcccctgattctgtggataaccgtattaccgcctttgagtgagctgataccgctcgccgcagccgaacgaccgagcgcagcgagtcagtgagcgaggaagcggaagagcgcccaatacgcaaaccgcctctccccgcgcgttggccgattcattaatgcagctggcacgacaggtttcccgactggaaagcgggcagtgagcgcaacgcaattaatgtgagttagctcactcattaggcaccccaggctttacactttatgcttccggctcgtatgttgtgtggaattgtgagcggataacaatttcacacaggaaacagctatgaccatgattacgccaagcgcgcaattaaccctcactaaagggaacaaaagctggagctccaccgcggtggcggccgctctagaactagtggatcccccgggctgcaggaattcgat

SEQ ID NO: 5564 - DNA, 8365 bp, Artificial Sequence
  Description of Artificial Sequence: Synthetic polynucleotide
  modified_base (4577)..(4582): a, c, t, g, unknown or other
ccgggcaggagcgtgaccgggctgccataactgaacgggaagccgcgctgccggagggtgtactgcgtgaacctcaacgggtgcgggaagctgtcagggaaattgcccgggaaaatctgctgcaggagcgacttcagcagatggagcgggatatggtccgcgacctgcagaaagagaaaaccctgggtggagactgatacaggaagacaaacgctgatgacaacggataacacgaacacgacacgtaacgattcactggttgcccggaccgatacctggttgcagtcgttgctggtctggtcacccggacagcgggatatcatcaaaacggtggcactggtgctgatggttctggaccatgcaaaccgtattctgcatctggaccagtcgtggatgtttctagccgggcgcggggcctttccgctgtttgccctggtgtgggggctgaatctgtcccgtcatgcgcatatccggcaactggccattaaccggctgtggggatgggcagttttttcccagttctggtattactttgccggctttccctggtatgaggggaatatcctgtttgcctttgcagtggcggcacaggtgctgacatggtgtgaaacgcgcagtgggtggcgtactgcagcggccattctcatgatggcactgtgggggcctttgtccggcaccagttacggcattgccgggctgctgatgctggctgtcagccaccggctgtaccgggcggaagacagaatggaacgtctggtgcttgtcgcttgcctgctggccgtgattccggcgcttaaccttgccaccagtgatgcggcggctgtagccggccttgtgatgacggtgctgaccgttggtctggtgtcgtgtgcagggaaattattatcccgtttctggcccggagactttttcccgacgttctatgcctgtcatctggctgtgctgggcgttctggcgctgtgacgggtgtggtatctttggccgcaagaggatgattcgtcaggaccggaaggtagcagccaaggcgggggactcgagtgccgggatgtggctgatggggccaccaccttgcgctcgttcgccagccaggacagaaatgcctcgacttcgctgctgcccaaggttgccgggtgacgcacaccgtggaaacggatgaaggcacgaacccagtggacataagcctgttcggttcgtaagctgtaatgcaagtagcgtatgcgctcacgcaactggtccagaaccttgaccgaacgcagcggtggtaacggcgcagtggcggttttcatggcttgttatgactgtttttttggggtacagtctatgcctcgggcatccaagcagcaagcgcgttacgccgtgggtcgatgtttgatgttatggagcagcaacgatgttacgcagcagggcagtcgccctaaaacaaagttaaacatcatgagggaagcggtgatcgccgaagtatcgactcaactatcagaggtagttggcgtcatcgagcgccatctcgaaccgacgttgctggccgtacatttgtacggctccgcagtggatggcggcctgaagccacacagtgatattgatttgctggttacggtgaccgtaaggcttgatgaaacaacgcggcgagctttgatcaacgaccttttggaaacttcggcttcccctggagagagcgagattctccgcgctgtagaagtcaccattgttgtgcacgacgacatcattccgtggcgttatccagctaagcgcgaactgcaatttggagaatggcagcgcaatgacattcttgcaggtatcttcgagccagccacgatcgacattgatctggctatcttgctgacaaaagcaagagaacatagcgttgccttggtaggtccagcggcggaggaactctttgatccggttcctgaacaggatctatttgaggcgctaaatgaaaccttaacgctatggaactcgccgcccgactgggctggcgatgagcgaaatgtagtgcttacgttgtcccgcatttggtacagcgcagtaaccggcaaaatcgcgccgaaggatgtcgctgccgactgggcaatggagcgcctgccggcccagtatcagcccgtcatacttgaagctagacaggcttatcttggacaagaagaagatcgcttggcctcgcgcgcagatcagttggaagaatttgtccactacgtgaaaggcgagatcaccaaggtagtcggcaaataatgtctaacaattcgttcaagccgacgccgcttcgcggcgcggcttaactcaagagaggaagagtaaggatggaacgggatatattttctgcgatattaccgaaaccgtatcgatcctcaggtacatcttcaactgccgcatcaagccctttctggttccacagctgcctcagtatcttcatattacagatctccgtacaggcagcgcagcccggtcagggcctccgccagcgggccttcttgacaccgcgtggcgagctcccggaccagcgtctcaaaggcctccgccggcataaaaatccgcaggccgtctatcccgaagaagccctccggcgtgacgtttccgggcggggagaacatcactcgctccccctggtgaccgtgcgtcagggcttccggatgccgggcatacagcgtgaacaggcccagcagttcggataacgcttcccagccgtacggcaccacgaagtcctggccggtgatcagcaggtgcagacggggtgtggtgtaccaggcccccgggcgttctccggggtgctggccgtcaacgcggatctccaggcgcagcgtgccggcctcaatggtttccgtgacggcagaaataaccgggcgcagctcctgtgccagcgttcttgcctgttctgtgttccagtccaggccgcgcagcatcaacgggaaaacagctttcagccgcggcagggtgaagatttctgccagcaccgcgtccggcacctccgccaggccaaaacagtcgctctcgagcggacgcaggaggtgttcggcatacatctgatccaccacggggcgcagcgctgcccggaaggcttcaaactcttccgtccagtttttcccggccaggcggaaaatccccttcaggtagtgaccgtccacagggcgatcgtgctccacctgccaggccagcaggttgccagtgatgtccagcagcgtgtccagggccgggagtgtggccagcctattatgcccgcgcaggaaggcctccctgacgtgaaccaggacaaagcgcagttcgtcgcgggagagcgctgacgtgccgatcaagcttatcgataccgtcgacctcgagggggggcccggtacccaattcgccctatagtgagtcgtattacgcgcgctcactggccgtcgttttacaacgtcgtgactgggaaaaccctggcgttacccaacttaatcgccttgcagcacatccccctttcgccagctggcgtaatagcgaagaggcccgcaccgatcgcccttcccaacagttgcgcagcctgaatggcgaatgggacgcgccctgtagcggcgcattaagcgcggcgggtgtggtggttacgcgcagcgtgaccgctacacttgccagcgccctagcgcccgctcctttcgctttcttcccttcctttctcgccacgttcgccggctttccccgtcaagctctaaatcgggggctccctttagggttccgatttagtgctttacggcacctcgaccccaaaaaacttgattagggtgatggttcacgtagtgggccatcgccctgatagacggtttttcgccctttgacgttggagtccacgttctttaatagtggactcttgttccaaactggaacaacactcaaccctatctcggtctattcttttgatttataagggattttgccgatttcggcctattggttaaaaaatgagctgatttaacaaaaatttaacgcgaattttaacaaaatattaacgcttacaatttaggtggcacttttcggggaaatgtgcgcggaacccctatttgtttatttttctaaatacattcaaatatgtatccgctcatgagattatcaaaaaggatcttcacctagatccttttggcgtagcaccaggcgtttaagggcaccaataactgccttaaaaaaacgccccgccctgccactcatcgcagtactgttgtaattcattaagcattctgccgacatggaagccatcacaaacggcatgatgaacctgaatcgccagcggcatcagcaccttgtcgccttgcgtataatatttgcccatggtgaaaacgggggcgaagaagttgtccatattggccacgtttaaatcaaaactggtgaaactcacccagggattggctgagacgaaaaacatattctcaataaaccctttagggaaataggccaggttttcaccgtaacacgccacatcttgcgaatatatgtgtagaaactgccggaaatcgtcgtggtattcactccagagcgatgaaaacgtttcagtttgctcatggaaaacggtgtaacaagggtgaacactatcccatatcaccagctcaccgtctttcattgccatacgnnnnnncggatgagcattcatcaggcgggcaagaatgtgaataaaggccggataaaacttgtgcttatttttctttacggtctttaaaaaggccgtaatatccagctgaacggtctggttataggtacattgagcaactgactgaaatgcctcaaaatgttctttacgatgccattgggatatatcaacggtggtatatccagtgatttttttctccattttagcttccttagctcctgaaaatctcgataactcaaaaaatacgcccggtagtgatcttatttcattatggtgaaagttggaacctcttacattattgaagcatttatcagggttattgtctcatgaccaaaatcccttaacgtgagttttcgttccactgagcgtcagatccgacagtaagacgggtaagcctgttgatgataccgctgccttactgggtgcattagccagtctgaatgacctgtcacgggataatccgaagtggtcagactggaaaatcagagggcaggaactgctgaacagcaaaaagtcagatagcaccacatagcagacccgccataaaacgccctgagaagcccgtgacgggcttttcttgtattatgggtagtttccttgcatgaatccataaaaggcgcctgtagtgccatttacccccattcactgccagagccgtgagcgcagcgaactgaatgtcacgaaaaagacagcgactcaggtgcctgatggtcggagcaaaaggaatattcagcgatttgcccgagcttgcgagggtgctacttaagcctttagggttttaaggtctgttttgtagaggagcaaacagcgtttgcgacatccttttgtaatactgcggaactgactaaagtagtgagttatacacagggctgggatctattctttttatctttttttattctttctttattctataaattataaccacttgaatataaacaaaaaaaacacacaaaggtctagcggaatttacagagggtctagcagaatttacaagttttccagcaaaggtctagcagaatttacagatacccacaactcaaaggaaaaggactagtaattatcattgactagcccatctcaattggtatagtgattaaaatcacctagaccaattgagatgtatgtctgaattagttgttttcaaagcaaatgaactagcgattagtcgctatgacttaacggagcatgaaaccaagctaattttatgctgtgtggcactactcaaccccacgattgaaaaccctacaaggaaagaacggacggtatcgttcacttataaccaatacgctcagatgatgaacatcagtagggaaaatgcttatggtgtattagctaaagcaaccagagagctgatgacgagaactgtggaaatcaggaatcctttggttaaaggctttgagattttccagtggacaaactatgccaagttctcaagcgaaaaattagaattagtttttagtgaagagatattgccttatcttttccagttaaaaaaattcataaaatataatctggaacatgttaagtcttttgaaaacaaatactctatgaggatttatgagtggttattaaaagaactaacacaaaagaaaactcacaaggcaaatatagagattagccttgatgaatttaagttcatgttaatgcttgaaaataactaccatgagtttaaaaggcttaaccaatgggttttgaaaccaataagtaaagatttaaacacttacagcaatatgaaattggtggttgataagcgaggccgcccgactgatacgttgattttccaagttgaactagatagacaaatggatctcgtaaccgaacttgagaacaaccagataaaaatgaatggtgacaaaataccaacaaccattacatcagattcctacctacgtaacggactaagaaaaacactacacgatgctttaactgcaaaaattcagctcaccagttttgaggcaaaatttttgagtgacatgcaaagtaagcatgatctcaatggttcgttctcatggctcacgcaaaaacaacgaaccacactagagaacatactggctaaatacggaaggatctgaggttcttatggctcttgtatctatcagtgaagcatcaagactaacaaacaaaagtagaacaactgttcaccgttacatatcaaagggaaaactgtccatatgcacagatgaaaacggtgtaaaaaagatagatacatcagagcttttacgagtttttggtgcatttaaagctgttcaccatgaacagatcgacaatgtaacagatgaacagcatgtaacacctaatagaacaggtgaaaccagtaaaacaaagcaactagaacatgaaattgaacacctgagacaacttgttacagctcaacagtcacacatagacagcctgaaacaggcgatgctgcttatcgaatcaaagctgccgacaacacgggagccagtgacgcctcccgtggggaaaaaatcatggcaattctggaagaaatagcgctttcagccggcaaacctgaagccggatctgcgattctgataacaaactagcaacaccagaacagcccgtttgcgggcagcaaaacccgtacttttggacgttccggcggttttttgtggcgagtggtgttcgggcggtgcgcgcaagatccattatgttaaacgggcgagtttacatctcaaaaccgcccgcttaacaccatcagaaatcctcagcgcgattttaagcaccaacccccccccgtaacacccaaatccatactgaaagtggctttgttgaataaatcgaacttttgctgagttgaaggatcagatcacgcatcctcccgacaacacagaccattccgtggcaaagcaaaagttcagaatcaccaactggtccacctacaacaaagctctcatcaaccgtggctccctcactttctggctggatgatgaggcgattcaggcctggtatgagtcggcaacaccttcatcacgaggaaggccccagcgctattctgatctcgccatcaccaccgttctggtgattaaacgcgtattccggctgaccctgcgggctgcgcagggttttattgattccatttttgccctgatgaacgttccgttgcgctgcccggattacaccagtgtcagtaagcgggcaaagtcggttaatgtcagtttcaaaacgtccacccggggtgaaatcgcacacctggtgattgattccaccgggctgaaggtctttggtgaaggcgaatggaaagtcagaaagcacggcaaagagcgccgtcgtatctggcgaaagttgcatcttgctgttggatctcacatgttctttcctgcgttatcccctgattctgtggataaccgtattaccgcctttgagtgagctgataccgctcgccgcagccgaacgaccgagcgcagcgagtcagtgagcgaggaagcggaagagcgcccaatacgcaaaccgcctctccccgcgcgttggccgattcattaatgcagctggcacgacaggtttcccgactggaaagcgggcagtgagcgcaacgcaattaatgtgagttagctcactcattaggcaccccaggctttacactttatgcttccggctcgtatgttgtgtggaattgtgagcggataacaatttcacacaggaaacagctatgaccatgattacgccaagcgcgcaattaaccctcactaaagggaacaaaagctggagctccaccgcggtggcggccgctctagaactagtggatcccccgggctgcaggaattcgat

SEQ ID NO: 5565 - DNA, 8367 bp, Artificial Sequence
  Description of Artificial Sequence: Synthetic polynucleotide
  modified_base (4579)..(4584): a, c, t, g, unknown or other
ccgggcaggagcgtgaccgggctgccataactgaacgggaagccgcgctgccggagggtgtactgcgtgaacctcaacgggtgcgggaagctgtcagggaaattgcccgggaaaatctgctgcaggagcgacttcagcagatggagcgggatatggtccgcgacctgcagaaagagaaaaccctgggtggagactgatacaggaagacaaacgctgatgacaacggataacacgaacacgacacgtaacgattcactggttgcccggaccgatacctggttgcagtcgttgctggtctggtcacccggacagcgggatatcatcaaaacggtggcactggtgctgatggttctggaccatgcaaaccgtattctgcatctggaccagtcgtggatgtttctagccgggcgcggggcctttccgctgtttgccctggtgtgggggctgaatctgtcccgtcatgcgcatatccggcaactggccattaaccggctgtggggatgggcagttttttcccagttctggtattactttgccggctttccctggtatgaggggaatatcctgtttgcctttgcagtggcggcacaggtgctgacatggtgtgaaacgcgcagtgggtggcgtactgcagcggccattctcatgatggcactgtgggggcctttgtccggcaccagttacggcattgccgggctgctgatgctggctgtcagccaccggctgtaccgggcggaagacagaatggaacgtctggtgcttgtcgcttgcctgctggccgtgattccggcgcttaaccttgccaccagtgatgcggcggctgtagccggccttgtgatgacggtgctgaccgttggtctggtgtcgtgtgcagggaaattattatcccgtttctggcccggagactttttcccgacgttctatgcctgtcatctggctgtgctgggcgttctggcgctgtgacgggtgtggtatctttggccgcaagaggatgattcgacgaagcgtacaacgtttatccgagttcaagagcaagagaacaacgtttacgggcgtgagtaagcgcatacttgcgctcgttcgccagccaggacagaaatgcctcgacttcgctgctgcccaaggttgccgggtgacgcacaccgtggaaacggatgaaggcacgaacccagtggacataagcctgttcggttcgtaagctgtaatgcaagtagcgtatgcgctcacgcaactggtccagaaccttgaccgaacgcagcggtggtaacggcgcagtggcggttttcatggcttgttatgactgtttttttggggtacagtctatgcctcgggcatccaagcagcaagcgcgttacgccgtgggtcgatgtttgatgttatggagcagcaacgatgttacgcagcagggcagtcgccctaaaacaaagttaaacatcatgagggaagcggtgatcgccgaagtatcgactcaactatcagaggtagttggcgtcatcgagcgccatctcgaaccgacgttgctggccgtacatttgtacggctccgcagtggatggcggcctgaagccacacagtgatattgatttgctggttacggtgaccgtaaggcttgatgaaacaacgcggcgagctttgatcaacgaccttttggaaacttcggcttcccctggagagagcgagattctccgcgctgtagaagtcaccattgttgtgcacgacgacatcattccgtggcgttatccagctaagcgcgaactgcaatttggagaatggcagcgcaatgacattcttgcaggtatcttcgagccagccacgatcgacattgatctggctatcttgctgacaaaagcaagagaacatagcgttgccttggtaggtccagcggcggaggaactctttgatccggttcctgaacaggatctatttgaggcgctaaatgaaaccttaacgctatggaactcgccgcccgactgggctggcgatgagcgaaatgtagtgcttacgttgtcccgcatttggtacagcgcagtaaccggcaaaatcgcgccgaaggatgtcgctgccgactgggcaatggagcgcctgccggcccagtatcagcccgtcatacttgaagctagacaggcttatcttggacaagaagaagatcgcttggcctcgcgcgcagatcagttggaagaatttgtccactacgtgaaaggcgagatcaccaaggtagtcggcaaataatgtctaacaattcgttcaagccgacgccgcttcgcggcgcggcttaactcaagagaggaagagtaaggatggaacgggatatattttctgcgatattaccgaaaccgtatcgatcctcaggtacatcttcaactgccgcatcaagccctttctggttccacagctgcctcagtatcttcatattacagatctccgtacaggcagcgcagcccggtcagggcctccgccagcgggccttcttgacaccgcgtggcgagctcccggaccagcgtctcaaaggcctccgccggcataaaaatccgcaggccgtctatcccgaagaagccctccggcgtgacgtttccgggcggggagaacatcactcgctccccctggtgaccgtgcgtcagggcttccggatgccgggcatacagcgtgaacaggcccagcagttcggataacgcttcccagccgtacggcaccacgaagtcctggccggtgatcagcaggtgcagacggggtgtggtgtaccaggcccccgggcgttctccggggtgctggccgtcaacgcggatctccaggcgcagcgtgccggcctcaatggtttccgtgacggcagaaataaccgggcgcagctcctgtgccagcgttcttgcctgttctgtgttccagtccaggccgcgcagcatcaacgggaaaacagctttcagccgcggcagggtgaagatttctgccagcaccgcgtccggcacctccgccaggccaaaacagtcgctctcgagcggacgcaggaggtgttcggcatacatctgatccaccacggggcgcagcgctgcccggaaggcttcaaactcttccgtccagtttttcccggccaggcggaaaatccccttcaggtagtgaccgtccacagggcgatcgtgctccacctgccaggccagcaggttgccagtgatgtccagcagcgtgtccagggccgggagtgtggccagcctattatgcccgcgcaggaaggcctccctgacgtgaaccaggacaaagcgcagttcgtcgcgggagagcgctgacgtgccgatcaagcttatcgataccgtcgacctcgagggggggcccggtacccaattcgccctatagtgagtcgtattacgcgcgctcactggccgtcgttttacaacgtcgtgactgggaaaaccctggcgttacccaacttaatcgccttgcagcacatccccctttcgccagctggcgtaatagcgaagaggcccgcaccgatcgcccttcccaacagttgcgcagcctgaatggcgaatgggacgcgccctgtagcggcgcattaagcgcggcgggtgtggtggttacgcgcagcgtgaccgctacacttgccagcgccctagcgcccgctcctttcgctttcttcccttcctttctcgccacgttcgccggctttccccgtcaagctctaaatcgggggctccctttagggttccgatttagtgctttacggcacctcgaccccaaaaaacttgattagggtgatggttcacgtagtgggccatcgccctgatagacggtttttcgccctttgacgttggagtccacgttctttaatagtggactcttgttccaaactggaacaacactcaaccctatctcggtctattcttttgatttataagggattttgccgatttcggcctattggttaaaaaatgagctgatttaacaaaaatttaacgcgaattttaacaaaatattaacgcttacaatttaggtggcacttttcggggaaatgtgcgcggaacccctatttgtttatttttctaaatacattcaaatatgtatccgctcatgagattatcaaaaaggatcttcacctagatccttttggcgtagcaccaggcgtttaagggcaccaataactgccttaaaaaaacgccccgccctgccactcatcgcagtactgttgtaattcattaagcattctgccgacatggaagccatcacaaacggcatgatgaacctgaatcgccagcggcatcagcaccttgtcgccttgcgtataatatttgcccatggtgaaaacgggggcgaagaagttgtccatattggccacgtttaaatcaaaactggtgaaactcacccagggattggctgagacgaaaaacatattctcaataaaccctttagggaaataggccaggttttcaccgtaacacgccacatcttgcgaatatatgtgtagaaactgccggaaatcgtcgtggtattcactccagagcgatgaaaacgtttcagtttgctcatggaaaacggtgtaacaagggtgaacactatcccatatcaccagctcaccgtctttcattgccatacgnnnnnncggatgagcattcatcaggcgggcaagaatgtgaataaaggccggataaaacttgtgcttatttttctttacggtctttaaaaaggccgtaatatccagctgaacggtctggttataggtacattgagcaactgactgaaatgcctcaaaatgttctttacgatgccattgggatatatcaacggtggtatatccagtgatttttttctccattttagcttccttagctcctgaaaatctcgataactcaaaaaatacgcccggtagtgatcttatttcattatggtgaaagttggaacctcttacattattgaagcatttatcagggttattgtctcatgaccaaaatcccttaacgtgagttttcgttccactgagcgtcagatccgacagtaagacgggtaagcctgttgatgataccgctgccttactgggtgcattagccagtctgaatgacctgtcacgggataatccgaagtggtcagactggaaaatcagagggcaggaactgctgaacagcaaaaagtcagatagcaccacatagcagacccgccataaaacgccctgagaagcccgtgacgggcttttcttgtattatgggtagtttccttgcatgaatccataaaaggcgcctgtagtgccatttacccccattcactgccagagccgtgagcgcagcgaactgaatgtcacgaaaaagacagcgactcaggtgcctgatggtcggagcaaaaggaatattcagcgatttgcccgagcttgcgagggtgctacttaagcctttagggttttaaggtctgttttgtagaggagcaaacagcgtttgcgacatccttttgtaatactgcggaactgactaaagtagtgagttatacacagggctgggatctattctttttatctttttttattctttctttattctataaattataaccacttgaatataaacaaaaaaaacacacaaaggtctagcggaatttacagagggtctagcagaatttacaagttttccagcaaaggtctagcagaatttacagatacccacaactcaaaggaaaaggactagtaattatcattgactagcccatctcaattggtatagtgattaaaatcacctagaccaattgagatgtatgtctgaattagttgttttcaaagcaaatgaactagcgattagtcgctatgacttaacggagcatgaaaccaagctaattttatgctgtgtggcactactcaaccccacgattgaaaaccctacaaggaaagaacggacggtatcgttcacttataaccaatacgctcagatgatgaacatcagtagggaaaatgcttatggtgtattagctaaagcaaccagagagctgatgacgagaactgtggaaatcaggaatcctttggttaaaggctttgagattttccagtggacaaactatgccaagttctcaagcgaaaaattagaattagtttttagtgaagagatattgccttatcttttccagttaaaaaaattcataaaatataatctggaacatgttaagtcttttgaaaacaaatactctatgaggatttatgagtggttattaaaagaactaacacaaaagaaaactcacaaggcaaatatagagattagccttgatgaatttaagttcatgttaatgcttgaaaataactaccatgagtttaaaaggcttaaccaatgggttttgaaaccaataagtaaagatttaaacacttacagcaatatgaaattggtggttgataagcgaggccgcccgactgatacgttgattttccaagttgaactagatagacaaatggatctcgtaaccgaacttgagaacaaccagataaaaatgaatggtgacaaaataccaacaaccattacatcagattcctacctacgtaacggactaagaaaaacactacacgatgctttaactgcaaaaattcagctcaccagttttgaggcaaaatttttgagtgacatgcaaagtaagcatgatctcaatggttcgttctcatggctcacgcaaaaacaacgaaccacactagagaacatactggctaaatacggaaggatctgaggttcttatggctcttgtatctatcagtgaagcatcaagactaacaaacaaaagtagaacaactgttcaccgttacatatcaaagggaaaactgtccatatgcacagatgaaaacggtgtaaaaaagatagatacatcagagcttttacgagtttttggtgcatttaaagctgttcaccatgaacagatcgacaatgtaacagatgaacagcatgtaacacctaatagaacaggtgaaaccagtaaaacaaagcaactagaacatgaaattgaacacctgagacaacttgttacagctcaacagtcacacatagacagcctgaaacaggcgatgctgcttatcgaatcaaagctgccgacaacacgggagccagtgacgcctcccgtggggaaaaaatcatggcaattctggaagaaatagcgctttcagccggcaaacctgaagccggatctgcgattctgataacaaactagcaacaccagaacagcccgtttgcgggcagcaaaacccgtacttttggacgttccggcggttttttgtggcgagtggtgttcgggcggtgcgcgcaagatccattatgttaaacgggcgagtttacatctcaaaaccgcccgcttaacaccatcagaaatcctcagcgcgattttaagcaccaacccccccccgtaacacccaaatccatactgaaagtggctttgttgaataaatcgaacttttgctgagttgaaggatcagatcacgcatcctcccgacaacacagaccattccgtggcaaagcaaaagttcagaatcaccaactggtccacctacaacaaagctctcatcaaccgtggctccctcactttctggctggatgatgaggcgattcaggcctggtatgagtcggcaacaccttcatcacgaggaaggccccagcgctattctgatctcgccatcaccaccgttctggtgattaaacgcgtattccggctgaccctgcgggctgcgcagggttttattgattccatttttgccctgatgaacgttccgttgcgctgcccggattacaccagtgtcagtaagcgggcaaagtcggttaatgtcagtttcaaaacgtccacccggggtgaaatcgcacacctggtgattgattccaccgggctgaaggtctttggtgaaggcgaatggaaagtcagaaagcacggcaaagagcgccgtcgtatctggcgaaagttgcatcttgctgttggatctcacatgttctttcctgcgttatcccctgattctgtggataaccgtattaccgcctttgagtgagctgataccgctcgccgcagccgaacgaccgagcgcagcgagtcagtgagcgaggaagcggaagagcgcccaatacgcaaaccgcctctccccgcgcgttggccgattcattaatgcagctggcacgacaggtttcccgactggaaagcgggcagtgagcgcaacgcaattaatgtgagttagctcactcattaggcaccccaggctttacactttatgcttccggctcgtatgttgtgtggaattgtgagcggataacaatttcacacaggaaacagctatgaccatgattacgccaagcgcgcaattaaccctcactaaagggaacaaaagctggagctccaccgcggtggcggccgctctagaactagtggatcccccgggctgcaggaattcgat

SEQ ID NO: 5566 - DNA, 4217 bp, Artificial Sequence
  Description of Artificial Sequence: Synthetic polynucleotide
atcaaagggaaaactgtccatatgcacagatgaaaacggtgtaaaaaagatagatacatcagagcttttacgagtttttggtgcatttaaagctgttcaccatgaacagatcgacaatgtaacagatgaacagcatgtaacacctaatagaacaggtgaaaccagtaaaacaaagcaactagaacatgaaattgaacacctgagacaacttgttacagctcaacagtcacacatagacagcctgaaacaggcgatgctgcttatcgaatcaaagctgccgacaacacgggagccagtgacgcctcccgtggggaaaaaatcatggcaattctggaagaaatagcgctcaaagatgcaggggtaaaagctaaccgcatctttaccgacaaggcatccggcagttcaacagatcgggaagggctggatttgctgaggatgaaggtggaggaaggtgatgtcattctggtgaagaagctcgaccgtcttggccgcgacaccgccgacatgatccaactgataaaagagtttgatgctcagggtgtagcggttcggtttattgacgacgggatcagtaccgacggtgatatggggcaaatggtggtcaccatcctgtcggctgtggcacaggctgaacgccggaggatccgcgcccaatacgcaaaccgcctctccccgcgcgttggccgattcattaatgcagctggcacgacaggtttcccgactggaaagcgggcagtgagcgcaacgcaattaatgtgagttagctcactcattaggcaccccaggctttacactttatgcttccggctcgtatgttgtgtggaattgtgagcggataacaatttcacacaggaaacagctatgaccatgattacgaattcccggggatccgtcgacctgcagccaagcttggcactggccgtcgttttacaacgtcgtgactgggaaaaccctggcgttacccaacttaatcgccttgcagcacatccccctttcgccagctggcgtaatagcgaagaggcccgcaccgatcgcccttcccaacagttgcgcagcctgaatggcgaatggcgcggatcctagagcgcacgaatgagggccgacaggaagcaaagctgaaaggaatcaaatttggccgcaggcgtaccgtggacaggaacgtcgtgctgacgcttcatcagaagggcactggtgcaacggaaattgctcatcagctcagtattgcccgctccacggtttataaaattcttgaagacgaaagggcctcgtgatacgcctatttttataggttaatgtcatgataataatggtttcttagacgtcaggtggcacttttcggggaaatgtgcgcggaacccctatttgtttatttttctaaatacattcaaatatgtatccgctcatgagacaataaccctgataaatgcttcaataatattgaaaaaggaagagtatgagtattcaacatttccgtgtcgcccttattcccttttttgcggcattttgccttcctgtttttgctcacccagaaacgctggtgaaagtaaaagatgctgaagatcagttgggtgcacgagtggttacatcgaactggatctcaacagcggtaagatccttgagagttttcgccccgaagaacgttttccaatgatgagcacttttaaagttctgctatgtggcgcggtattatcccgtgttgacgccgggcaagagcaactcggtcgccgcatacactattctcagaatgacttggttgagtactcaccagtcacagaaaagcatcttacggatggcatgacagtaagagaattatgcagtgctgccataaccatgagtgataacactgcggccaacttacttctgacaacgatcggaggaccgaaggagctaaccgcttttttgcacaacatgggggatcatgtaactcgccttgatcgttgggaaccggagctgaatgaagccataccaaacgacgagcgtgacaccacgatgcctgcagcaatggcaacaacgttgcgcaaactattaactggcgaactacttactctagcttcccggcaacaattaatagactggatggaggcggataaagttgcaggaccacttctgcgctcggcccttccggctggctggtttattgctgataaatctggagccggtgagcgtgggtctcgcggtatcattgcagcactggggccagatggaaatagacagatcgctgagataggtgcctcactgattaagcattggtaactgtcagaccgaaatagacagatcgctgagataggtgcctcactgattaagcattggtaactgtcagaccaagtttactcatatatactttagattgatttaaaacttcatttttaatttaaaaggatctaggtgaagatcctttttgataatctcatgaccaaaatcccttaacgtgagttttcgttccactgagcgtcagaccccgttgatgataccgctgccttactgggtgcattagccagtctgaatgacctgtcacgggataatccgaagtggtcagactggaaaatcagagggcaggaactgctgaacagcaaaaagtcagatagcaccacatagcagacccgccataaaacgccctgagaagcccgtgacgggcttttcttgtattatgggtagtttccttgcatgaatccataaaaggcgcctgtagtgccatttacccccattcactgccagagccgtgagcgcagcgaactgaatgtcacgaaaaagacagcgactcaggtgcctgatggtcggagacaaaaggaatattcagcgatttgcccgagcttgcgagggtgctacttaagcctttagggttttaaggtctgttttgtagaggagcaaacagcgtttgcgacatccttttgtaatactgcggaactgactaaagtagtgagttatacacagggctgggatctattctttttatctttttttattctttctttattctataaattataaccacttgaatataaacaaaaaaaacacacaaaggtctagcggaatttacagagggtctagcagaatttacaagttttccagcaaaggtctagcagaatttacagatacccacaactcaaaggaaaaggactagtaattatcattgactagcccatctcaattggtatagtgattaaaatcacctagaccaattgagatgtatgtctgaattagttgttttcaaagcaaatgaactagcgattagtcgctatgacttaacggagcatgaaaccaagctaattttatgctgtgtggcactactcaaccccacgattgaaaaccctacaaggaaagaacggacggtatcgttcacttataaccaatacgctcagatgatgaacatcagtagggaaaatgcttatggtgtattagctaaagcaaccagagagctgatgacgagaactgtggaaatcaggaatcctttggttaaaggctttgagattttccagtggacaaactatgccaagttctcaagcgaaaaattagaattagtttttagtgaagagatattgccttatcttttccagttaaaaaaattcataaaatataatctggaacatgttaagtcttttgaaaacaaatactctatgaggatttatgagtggttattaaaagaactaacacaaaagaaaactcacaaggcaaatatagagattagccttgatgaatttaagttcatgttaatgcttgaaaataactaccatgagtttaaaaggcttaaccaatgggttttgaaaccaataagtaaagatttaaacacttacagcaatatgaaattggtggttgataagcgaggccgcccgactgatacgttgattttccaagttgaactagatagacaaatggatctcgtaaccgaacttgagaacaaccagataaaaatgaatggtgacaaaataccaacaaccattacatcagattcctacctacgtaacggactaagaaaaacactacacgatgctttaactgcaaaaattcagctcaccagttttgaggcaaaatttttgagtgacatgcaaagtaagcatgatctcaatggttcgttctcatggctcacgcaaaaacaacgaaccacactagagaacatactggctaaatacggaaggatctgaggttcttatggctcttgtatctatcagtgaagcatcaagactaacaaacaaaagtagaacaactgttcaccgttagat

SEQ ID NO: 5567 - DNA, 7347 bp, Artificial Sequence
  Description of Artificial Sequence: Synthetic polynucleotide
ggcctcgtgatacgcctatttttataggttaatgtcatgataataatggtttcttagacgtcaggtggcacttttcggggaaatgtgcgcggaacccctatttgtttatttttctaaatacattcaaatatgtatccgctcatgagacaataaccctgataaatgcttcaataatattgaaaaaggaagagtatgagtattcaacatttccgtgtcgcccttattcccttttttgcggcattttgccttcctgtttttgctcacccagaaacgctggtgaaagtaaaagatgctgaagatcagttgggtgcacgagtggttacatcgaactggatctcaacagcggtaagatccttgagagttttcgccccgaagaacgttttccaatgatgagcacttttaaagttctgctatgtggcgcggtattatcccgtgttgacgccgggcaagagcaactcggtcgccgcatacactattctcagaatgacttggttgagtactcaccagtcacagaaaagcatcttacggatggcatgacagtaagagaattatgcagtgctgccataaccatgagtgataacactgcggccaacttacttctgacaacgatcggaggaccgaaggagctaaccgcttttttgcacaacatgggggatcatgtaactcgccttgatcgttgggaaccggagctgaatgaagccataccaaacgacgagcgtgacaccacgatgcctgcagcaatggcaacaacgttgcgcaaactattaactggcgaactacttactctagcttcccggcaacaattaatagactggatggaggcggataaagttgcaggaccacttctgcgctcggcccttccggctggctggtttattgctgataaatctggagccggtgagcgtgggtctcgcggtatcattgcagcactggggccagatggaaatagacagatcgctgagataggtgcctcactgattaagcattggtaactgtcagaccgaaatagacagatcgctgagataggtgcctcactgattaagcattggtaactgtcagaccaagtttactcatatatactttagattgatttaaaacttcatttttaatttaaaaggatctaggtgaagatcctttttgataatctcatgaccaaaatcccttaacgtgagttttcgttccactgagcgtcagaccccgttgatgataccgctgccttactgggtgcattagccagtctgaatgacctgtcacgggataatccgaagtggtcagactggaaaatcagagggcaggaactgctgaacagcaaaaagtcagatagcaccacatagcagacccgccataaaacgccctgagaagcccgtgacgggcttttcttgtattatgggtagtttccttgcatgaatccataaaaggcgcctgtagtgccatttacccccattcactgccagagccgtgagcgcagcgaactgaatgtcacgaaaaagacagcgactcaggtgcctgatggtcggagacaaaaggaatattcagcgatttgcccgagcttgcgagggtgctacttaagcctttagggttttaaggtctgttttgtagaggagcaaacagcgtttgcgacatccttttgtaatactgcggaactgactaaagtagtgagttatacacagggctgggatctattctttttatctttttttattctttctttattctataaattataaccacttgaatataaacaaaaaaaacacacaaaggtctagcggaatttacagagggtctagcagaatttacaagttttccagcaaaggtctagcagaatttacagatacccacaactcaaaggaaaaggactagtaattatcattgactagcccatctcaattggtatagtgattaaaatcacctagaccaattgagatgtatgtctgaattagttgttttcaaagcaaatgaactagcgattagtcgctatgacttaacggagcatgaaaccaagctaattttatgctgtgtggcactactcaaccccacgattgaaaaccctacaaggaaagaacggacggtatcgttcacttataaccaatacgctcagatgatgaacatcagtagggaaaatgcttatggtgtattagctaaagcaaccagagagctgatgacgagaactgtggaaatcaggaatcctttggttaaaggctttgagattttccagtggacaaactatgccaagttctcaagcgaaaaattagaattagtttttagtgaagagatattgccttatcttttccagttaaaaaaattcataaaatataatctggaacatgttaagtcttttgaaaacaaatactctatgaggatttatgagtggttattaaaagaactaacacaaaagaaaactcacaaggcaaatatagagattagccttgatgaatttaagttcatgttaatgcttgaaaataactaccatgagtttaaaaggcttaaccaatgggttttgaaaccaataagtaaagatttaaacacttacagcaatatgaaattggtggttgataagcgaggccgcccgactgatacgttgattttccaagttgaactagatagacaaatggatctcgtaaccgaacttgagaacaaccagataaaaatgaatggtgacaaaataccaacaaccattacatcagattcctacctacgtaacggactaagaaaaacactacacgatgctttaactgcaaaaattcagctcaccagttttgaggcaaaatttttgagtgacatgcaaagtaagcatgatctcaatggttcgttctcatggctcacgcaaaaacaacgaaccacactagagaacatactggctaaatacggaaggatctgaggttcttatggctcttgtatctatcagtgaagcatcaagactaacaaacaaaagtagaacaactgttcaccgttagatatcaaagggaaaactgtccatatgcacagatgaaaacggtgtaaaaaagatagatacatcagagcttttacgagtttttggtgcatttaaagctgttcaccatgaacagatcgacaatgtaacagatgaacagcatgtaacacctaatagaacaggtgaaaccagtaaaacaaagcaactagaacatgaaattgaacacctgagacaacttgttacagctcaacagtcacacatagacagcctgaaacaggcgatgctgcttatcgaatcaaagctgccgacaacacgggagccagtgacgcctcccgtggggaaaaaatcatggcaattctggaagaaatagcgctcaaagatgcaggggtaaaagctaaccgcatctttaccgacaaggcatccggcagttcaacagatcgggaagggctggatttgctgaggatgaaggtggaggaaggtgatgtcattctggtgaagaagctcgaccgtcttggccgcgacaccgccgacatgatccaactgataaaagagtttgatgctcagggtgtagcggttcggtttattgacgacgggatcagtaccgacggtgatatggggcaaatggtggtcaccatcctgtcggctgtggcacaggctgaacgccggaggatccgcgcccaatacgcaaaccgcctctccccgcgcgttggccgattcattaatgcagctggcacgacaggtttcccgactggaaagcgggcagtgagcgcaacgcaattaatgtgagttagctcactcattaggcaccccaggctttacactttatgcttccggctcgtatgttgtgtggaattgtgagcggataacaatttcaaggaggtaacagctatgtatcgccgtcatctgaaacacagtcgcgtcaagaacttatttaagttcgtgagcgctaaaatgaataccgtctttacggtagagtctgcgcttgaatttgatacgtgttttcatctggaatactcaccatccgtgaaattttacgaagcgcagccggagggtttttattacgagttcgctggtcgtcaatgcccatatacccctgactttcgtttggtggatcagaacgactcggtttcgtttcttgaaatcaagccctctgacaaggtggctgatccagattttctgcatcgctttcccctgaagcagcagcgcgccattgaacttagttcaccattaaagcttgttactgaaaaacaaatccgcattgatcctatcctggggaacttaaagttacttcaccgctattctggctttcaatcctttactcctttgcatatgcaattattgggtctggtgcaaaaattgggtcgcgtatcactgctgcgtttaagtgactccatcgacgcaccacctgaggaggtattagcaagcgcgttatccttaatcgctcgtggaattatgcagagtgacttaacggtacagaagattggcatcagttcgttcgtgtgggctggcggtcattcaggcattgaccatggataagcataacggcggtttatttgaagacgaattcgtaattccccaaccatccacatctacctcacccattgacgccatccaagctgtccttccggctactgttgatagctttccttatgttttaaaagttgaggcgctgcatcgtcgcgattacattctttgggtggagaagaatcttgccgggggttggacagagaagaaccttactcccttgttggcagatgcagcgttggttttacctccccccacgcctaattggcgtactctggcacgctggcgtaaaatctatattcaacacggtcgtaaacttgtcagtttaatcccaaaacatcaggcaaaaggtaacgctcgcagtcgccttccacccagtgatgagctgtttttcgagcaagcagtacatcgttacttagtaggagagcagccttcaattgcgtcggcattccagttgtactccgactcaatccgtatcgagaatcttggtgtggtggagaatcctattaaaactatcagctacatggctttctacaaccgcattaagaaattaccggcgtatcaagtaatgaagagccgtaagggctcctatattgccgacgtcgagttcaaagccattgcctctcacaagccaccgagtcgtattatggagcgcgtggagatcgatcacacaccattggatttacttttattggatgatgacttgcttgtgccacttgggcgtccttcccttacattattgattgatgcctattcgcattgcgtggtcggctttaatcttaatttcaatcagccttcatacgagtccgttcgtaatgcgctgttatcgagcatctccaaaaaagattatgttaaaaacaaatacccatccatcgaacacgaatggccatgctacggtaagccagagacccttgtcgtggataacggggtcgagttttggtccgcttcccttgcacaatcgtgccttgaactgggaattaacattcagtacaatcctgttcgcaaaccttggttaaagccgatgatcgagcgtatgttcgggattattaaccgtaagcttctggaacccattccgggcaaaaccttcagcaacatccaggagaagggtgattatgatccccaaaaagacgctgttatgcgctttagcacatttcttgaaatctttcatcactgggtcattgacgtgtatcactacgaacctgacagccgttaccgttacattccgattatctcctggcaacacggaaataaagacgccccacctgcaccaatcattggtgatgatttgacaaagctggaagtgattttaagtctttcgttacattgtacccatcgtcgtggcggtatccagcgctaccatttgcgctatgattctgacgagttagcatcatatcgtatgaactatccagatcagacgcgtggcaaacgtaaagttctggtcaaacttaatcctcgtgatatctcttatgtgtacgtcttcttggaggatttagggtcatacattcgtgtcccttgtatcgacccgattggttacaccaagggtttatctctgcaagaacaccagatcaacgtcaagttgcatcgcgattttattaatgagcagatggatgtggtgagtctgagcaaggcacgtatttacctgaatgatcgcattaaaaacgagcttatcgaagtgcgtcgcaacatccgtcagcgcaacgtgaaaggggtaaataagattgccaagtatcgtaatgttggatctcacgcagaaacatccattgttcatgagctgaaccatcctgcgacgaatgaggtcatctctaagatggagagtgccagccagcccgaacactgtgacgattgggataatttcacttctggcttggagccctactgatggacctttcgtgtcacgacgcagacaaattgcgctcgtttattgaatgttatgtagaaaccccgcttcttcgcgctatccaggaagacttcgatcgtcttcgtttcaacaagcaatttgcaggtgagccgcagtgtatgttgcttactggtgacaccggcaccggcaagagctcccttatccgtcattacgcagccaaacatcctgaacaggtacgtcacggtttcattcacaagccattacttgtttcacgcattccgtctcgtcccacccttgaatctaccatggtggagttgcttaaagatttaggtcaattcggcagttctgatcgtatccataaaagttccgccgaaagtttaaccgaggctttaattaaatgtcttaaacgctgtgagaccgagctgattatcatcgacgagtttcaagagcttattgaaaataagacccgcgagaagcgcaaccaaattgcgaatcgcttgaagtatatttcggaaacagctaagattccgattgttttagtaggtatgccctgggcgaccaagattgcagaagagccacaatggagctctcgcttgttgattcgtcgttcaatcccctattttaagttatccgacgatcgtgaaaattttatccgccttattatgggattggcgaatcgcatgccctttgagacccaagcacgccttgagaccaaacacactatctacgctttgtttgccgcgtgctacgggagccttcgtgcactgaaacaactgctggacgaatcagttaagcaagcgttggccgcccatgccgagacgctgaagcatgagcacattgccgtggcttatgcattattttacccggatcaggtcaatccgtttttacagccgattgacgagatcaaggcttgtgaggttaagcaatatagtcgttacgaaatcgatgccgccgggaaagaggaagtcctgaacccattacaatttactgataaaatcccgatttctcagctgttaaaaaaacgataatgactcga

SEQ ID NO: 5568 - DNA, 4357 bp, Artificial Sequence
  Description of Artificial Sequence: Synthetic polynucleotide
atcgatgcataatgtgcctgtcaaatggacgaagcagggattctgcaaaccctatgctactccgtcaagccgtcaattgtctgattcgttaccaattatgacaacttgacggctacatcattcactttttcttcacaaccggcacggaactcgctcgggctggccccggtgcattttttaaatacccgcgagaaatagagttgatcgtcaaaaccaacattgcgaccgacggtggcgataggcatccgggtggtgctcaaaagcagcttcgcctggctgatacgttggtcctcgcgccagcttaagacgctaatccctaactgctggcggaaaagatgtgacagacgcgacggcgacaagcaaacatgctgtgcgacgctggcgatatcaaaattgctgtctgccaggtgatcgctgatgtactgacaagcctcgcgtacccgattatccatcggtggatggagcgactcgttaatcgcttccatgcgccgcagtaacaattgctcaagcagatttatcgccagcagctccgaatagcgcccttccccttgcccggcgttaatgatttgcccaaacaggtcgctgaaatgcggctggtgcgcttcatccgggcgaaagaaccccgtattggcaaatattgacggccagttaagccattcatgccagtaggcgcgcggacgaaagtaaacccactggtgataccattcgcgagcctccggatgacgaccgtagtgatgaatctctcctggcgggaacagcaaaatatcacccggtcggcaaacaaattctcgtccctgatttttcaccaccccctgaccgcgaatggtgagattgagaatataacctttcattcccagcggtcggtcgataaaaaaatcgagataaccgttggcctcaatcggcgttaaacccgccaccagatgggcattaaacgagtatcccggcagcaggggatcattttgcgcttcagccatacttttcatactcccgccattcagagaagaaaccaattgtccatattgcatcagacattgccgtcactgcgtcttttactggctcttctcgctaaccaaaccggtaaccccgcttattaaaagcattctgtaacaaagcgggaccaaagccatgacaaaaacgcgtaacaaaagtgtctataatcacggcagaaaagtccacattgattatttgcacggcgtcacactttgctatgccatagcatttttatccataagattagcggatcctacctgacgctttttatcgcaactctctactgtttctccatacccgtttttttgggctagcaggaggaattcaccatggtacccggggatcctctagagtcgacctgcaggcatgcaagcttggctgttttggcggatgagagaagattttcagcctgatacagattaaatcagaacgcagaagcggtctgataaaacagaatttgcctggcggcagtagcgcggtggtcccacctgaccccatgccgaactcagaagtgaaacgccgtagcgccgatggtagtgtggggtctccccatgcgagagtagggaactgccaggcatcaaataaaacgaaaggctcagtcgaaagactgggcctttcgttttatctgttgtttgtcggtgaacgctctcctgagtaggacaaatccgccgggagcggatttgaacgttgcgaagcaacggcccggagggtggcgggcaggacgcccgccataaactgccaggcatcaaattaagcagaaggccatcctgacggatggcctttttgcgtttctacaaactcttttgtttatttttctaaatacattcaaatatgtatccgctcatggagctcgaattggccgcggcgttgtgacaatttaccgaacaactccgcggccgggaagccgatctcggcttgaacgaattgttaggtggcggtacttgggtcgatatcaaagtgcatcacttcttcccgtatgcccaactttgtatagagagccactgcgggatcgtcaccgtaatctgcttgcacgtagatcacataagcaccaagcgcgttggcctcatgcttgaggagattgatgagcgcggtggcaatgccctgcctccggtgctcgccggagactgcgagatcatagatatagatctcactacgcggctgctcaaacctgggcagaacgtaagccgcgagagcgccaacaaccgcttcttggtcgaaggcagcaagcgcgatgaatgtcttactacggagcaagttcccgaggtaatcggagtccggctgatgttgggagtaggtggctacgtctccgaactcacgaccgaaaagatcaagagcagcccgcatggatttgacttggtcagggccgagcctacatgtgcgaatgatgcccatacttgagccacctaactttgttttagggcgactgccctgctgcgtaacatcgttgctgctgcgtaacatcgttgctgctccataacatcaaacatcgacccacggcgtaacgcgcttgctgcttggatgcccgaggcatagactgtacaaaaaaacagtcataacaagccatgaaaaccgccactgcgccgttaccaccgctgcgttcggtcaaggttctggaccagttgcgtgagcgcatacgctacttgcattacagtttacgaaccgaacaggcttatgtcaattcgagctctccatgaccaaaatcccttaacgtgagttttcgttccactgagcgtcagaccccgtagaaaagatcaaaggatcttcttgagatcctttttttctgcgcgtaatctgctgcttgcaaacaaaaaaaccaccgctaccagcggtggtttgtttgccggatcaagagctaccaactctttttccgaaggtaactggcttcagcagagcgcagataccaaatactgtccttctagtgtagccgtagttaggccaccacttcaagaactctgtagcaccgcctacatacctcgctctgctaatcctgttaccagtggctgctgccagtggcgataagtcgtgtcttaccgggttggactcaagacgatagttaccggataaggcgcagcggtcgggctgaacggggggttcgtgcacacagcccagcttggagcgaacgacctacaccgaactgagatacctacagcgtgagctatgagaaagcgccacgcttcccgaagggagaaaggcggacaggtatccggtaagcggcagggtcggaacaggagagcgcacgagggagcttccagggggaaacgcctggtatctttatagtcctgtcgggtttcgccacctctgacttgagcgtcgatttttgtgatgctcgtcaggggggcggagcctatggaaaaacgccagcaacgcggcctttttacggttcctggccttttgctggccttttgctcacatgttctttcctgcgttatcccctgattctgtggataaccgtattaccgcctttgagtgagctgataccgctcgccgcagccgaacgaccgagcgcagcgagtcagtgagcgaggaagcggaagagcgcctgatgcggtattttctccttacgcatctgtgcggtatttcacaccgcatatggtgcactctcagtacaatctgctctgatgccgcatagttaagccagtatacactccgctatcgctacgtgactgggtcatggctgcgccccgacacccgccaacacccgctgacgcgccctgacgggcttgtctgctcccggcatccgcttacagacaagctgtgaccgtctccgggagctgcatgtgtcagaggttttcaccgtcatcaccgaaacgcgcgaggcagctgcggtaaagctcatcagcgtggtcgtgaagcgattcacagatgtctgcctgttcatccgcgtccagctcgttgagtttctccagaagcgttaatgtctggcttctgataaagcgggccatgttaagggcggttttttcctgtttggtcactgatgcctccgtgtaagggggatttctgttcatgggggtaatgataccgatgaaacgagagaggatgctcacgatacgggttactgatgatgaacatgcccggttactggaacgttgtgagggtaaacaactggcggtatggatgcggcgggaccagagaaaaatcactcagggtcaatgccagcgctagcagcacgccatagtgactggcgatgctgtcggaatggacgatatcccgcaagaggcccggcagtaccggcataaccaagcctatgcctacagcatccagggtgacggtgccgaggatgacgatgagcgcattgttagatttcatacacggtgcctgactgcgttagcaatttaactgtgataaactaccgcattaaagctagctt

SEQ ID NO: 5569 - DNA, 9320 bp, Artificial Sequence
  Description of Artificial Sequence: Synthetic polynucleotide
cgccggagactgcgagatcatagatatagatctcactacgcggctgctcaaacctgggcagaacgtaagccgcgagagcgccaacaaccgcttcttggtcgaaggcagcaagcgcgatgaatgtcttactacggagcaagttcccgaggtaatcggagtccggctgatgttgggagtaggtggctacgtctccgaactcacgaccgaaaagatcaagagcagcccgcatggatttgacttggtcagggccgagcctacatgtgcgaatgatgcccatacttgagccacctaactttgttttagggcgactgccctgctgcgtaacatcgttgctgctgcgtaacatcgttgctgctccataacatcaaacatcgacccacggcgtaacgcgcttgctgcttggatgcccgaggcatagactgtacaaaaaaacagtcataacaagccatgaaaaccgccactgcgccgttaccaccgctgcgttcggtcaaggttctggaccagttgcgtgagcgcatacgctacttgcattacagtttacgaaccgaacaggcttatgtcaattcgagctctccatgaccaaaatcccttaacgtgagttttcgttccactgagcgtcagaccccgtagaaaagatcaaaggatcttcttgagatcctttttttctgcgcgtaatctgctgcttgcaaacaaaaaaaccaccgctaccagcggtggtttgtttgccggatcaagagctaccaactctttttccgaaggtaactggcttcagcagagcgcagataccaaatactgtccttctagtgtagccgtagttaggccaccacttcaagaactctgtagcaccgcctacatacctcgctctgctaatcctgttaccagtggctgctgccagtggcgataagtcgtgtcttaccgggttggactcaagacgatagttaccggataaggcgcagcggtcgggctgaacggggggttcgtgcacacagcccagcttggagcgaacgacctacaccgaactgagatacctacagcgtgagctatgagaaagcgccacgcttcccgaagggagaaaggcggacaggtatccggtaagcggcagggtcggaacaggagagcgcacgagggagcttccagggggaaacgcctggtatctttatagtcctgtcgggtttcgccacctctgacttgagcgtcgatttttgtgatgctcgtcaggggggcggagcctatggaaaaacgccagcaacgcggcctttttacggttcctggccttttgctggccttttgctcacatgttctttcctgcgttatcccctgattctgtggataaccgtattaccgcctttgagtgagctgataccgctcgccgcagccgaacgaccgagcgcagcgagtcagtgagcgaggaagcggaagagcgcctgatgcggtattttctccttacgcatctgtgcggtatttcacaccgcatatggtgcactctcagtacaatctgctctgatgccgcatagttaagccagtatacactccgctatcgctacgtgactgggtcatggctgcgccccgacacccgccaacacccgctgacgcgccctgacgggcttgtctgctcccggcatccgcttacagacaagctgtgaccgtctccgggagctgcatgtgtcagaggttttcaccgtcatcaccgaaacgcgcgaggcagctgcggtaaagctcatcagcgtggtcgtgaagcgattcacagatgtctgcctgttcatccgcgtccagctcgttgagtttctccagaagcgttaatgtctggcttctgataaagcgggccatgttaagggcggttttttcctgtttggtcactgatgcctccgtgtaagggggatttctgttcatgggggtaatgataccgatgaaacgagagaggatgctcacgatacgggttactgatgatgaacatgcccggttactggaacgttgtgagggtaaacaactggcggtatggatgcggcgggaccagagaaaaatcactcagggtcaatgccagcgctagcagcacgccatagtgactggcgatgctgtcggaatggacgatatcccgcaagaggcccggcagtaccggcataaccaagcctatgcctacagcatccagggtgacggtgccgaggatgacgatgagcgcattgttagatttcatacacggtgcctgactgcgttagcaatttaactgtgataaactaccgcattaaagctagcttatcgatgcataatgtgcctgtcaaatggacgaagcagggattctgcaaaccctatgctactccgtcaagccgtcaattgtctgattcgttaccaattatgacaacttgacggctacatcattcactttttcttcacaaccggcacggaactcgctcgggctggccccggtgcattttttaaatacccgcgagaaatagagttgatcgtcaaaaccaacattgcgaccgacggtggcgataggcatccgggtggtgctcaaaagcagcttcgcctggctgatacgttggtcctcgcgccagcttaagacgctaatccctaactgctggcggaaaagatgtgacagacgcgacggcgacaagcaaacatgctgtgcgacgctggcgatatcaaaattgctgtctgccaggtgatcgctgatgtactgacaagcctcgcgtacccgattatccatcggtggatggagcgactcgttaatcgcttccatgcgccgcagtaacaattgctcaagcagatttatcgccagcagctccgaatagcgcccttccccttgcccggcgttaatgatttgcccaaacaggtcgctgaaatgcggctggtgcgcttcatccgggcgaaagaaccccgtattggcaaatattgacggccagttaagccattcatgccagtaggcgcgcggacgaaagtaaacccactggtgataccattcgcgagcctccggatgacgaccgtagtgatgaatctctcctggcgggaacagcaaaatatcacccggtcggcaaacaaattctcgtccctgatttttcaccaccccctgaccgcgaatggtgagattgagaatataacctttcattcccagcggtcggtcgataaaaaaatcgagataaccgttggcctcaatcggcgttaaacccgccaccagatgggcattaaacgagtatcccggcagcaggggatcattttgcgcttcagccatacttttcatactcccgccattcagagaagaaaccaattgtccatattgcatcagacattgccgtcactgcgtcttttactggctcttctcgctaaccaaaccggtaaccccgcttattaaaagcattctgtaacaaagcgggaccaaagccatgacaaaaacgcgtaacaaaagtgtctataatcacggcagaaaagtccacattgattatttgcacggcgtcacactttgctatgccatagcatttttatccataagattagcggatcctacctgacgctttttatcgcaactctctactgtttctccatacccgtttttttgggctagcaggaggaattcaccatgcaccttcttgtacgcccggaaccgtttgcggacgaggctttggaatcatacttcttacgtttgtcacaggagaatggatttgagcgctaccgcattttctccggctccgtacaagattggcttcatacaacagatcacgctgccgctggcgccttccctcttgagctgagtcgtttaaatatctttcacgcctctcgcagttctggtttgcgcgtccgtgctcttcaattggttgaccgtcttaccgatggcgccccctttcgcctgcttcagctggcattatgtcattcggcaattagcttcgggaatcattacaaggctgttcatcgcagtggcgtggatatcccattatctttcattcgtgtccaccaaattccttgctgccccgattgccttcgcgagagcgcttatgtacgccaatgttggcattttaaaccgtacgtgggatgccatcgccacgggggccgcttaatttattcatgtccagcatgtggggagtctttgaactatttagcctcagaatcgattaatcattgccagtgcgggttcgacttacgtacggcctcaactgttcccgcacagcccgatgaaattcagttgtcagccttggcctacggatgctcgttcgagtcttccaatccgcttcttgcgatcggctctttatcggcccgtttcggagctttatactggtatcagcagcgttacctgtcggatcacgaggctgtgcgtgacgatcgtgctttgaccaaggcgattggtcactttaccgcttggcccgatgctttctggcgtgaattgcaacagatggtagacgacgccttagtacgccaaactaagccgttgaaccatactgactttgtagacgtctttggctcggttgttgctgattgtcgtcagattcccatgcgcaacacgggccaaaatttcattttaaaaaacttgatcggatttcttacagatttggtggcacgccaccctcagtgtcgcgtagcaaatgtcggcgatcttctgctgtcggcagttgacgcggccacacttctttctacttcggtcgagcaggtacgtcgtctgcatcacgaggggttcttacccttgtctatccgccctgctagtcgcaataccgtctctccgcatcgcgcagtcttccatttacgccacgtcgtcgaattgcgtcaagcacgcatgcaatcacatcatgatcacagttcaacctatctacctgcatggtgaccatcatgcacatcgaagagttgttggacatcgaagaccatggggagcgtgatcgccaattgcgccgttacctggcgccatactctgcagagatcggggtcgatggggccgaaaagatggctttagtggtccttttgaatcttactctgaagcgcgaccgtgttgagagcttatgtgacgagggtctggctcgtcagttactgtctgatgaagggcatatcacaaactgcctgcacacggttcgttggttgcacacacacaacttaaagtacccggatgctcgtgtctcaggcgagcgtttaattattaacgctccgccattgatcccgggtgtaatctcatcggcaggcttaccgatgcgcatggggtgggcccatgactcaagcgatatcaacttagccaagctgttcggaacaagttttcgctatcgcgatgactcaacaaatttagcacttcagcttgtggcgcgtagcaaaacttgggaacaagccttaattggactgggactgactcagcagcaattggatatctggtgtcaacttttggcatctaatcttgaaaataacacatttcccactgttgtgtcccccttttccaaacaggtgcgcttcttgtatcagggtaactattgcgtggttacgcccgtcgtctctcacgcccttcttgcgcaattgcaaaatgtggttcacgaaaagaagttacagtgtacgtacattcaccatgaccaccccgcctcagttggcagtttagtgggggccttgggtggtaaagtcgctgtattagattacccgcccccagtttccccggataaagctcgtagctttagccaggcccgcaaacatcgcttggcgaatggtcagagcctgtttgatcgttccgtgtttaacgaccatgtattcatcgacgcgttaaaacatgtgattagtcgccccggattaactcgcaaacaacaacgtcaattacgcctttccgcattgcgttaccttcgtcgccagttggccatttggttaggccccattattgagtggcgtgatgagattgtttctagcggtcgtggagaaccaggaaatctgccatcaggaggattagagcttgagctgattacccaaccaaagaagatgttacctgagctgatgcttcaggttgcagggcgttttcatttagagcttcagaaccacagtgcaggacgccgcttcgccttccatccggcgttaatggctcctatcaaatctcaaattctttggctgcttcgccaattggccgacgatgaagaaaaggatgaacctcacccccccaccagttgctattatttacacctttcagggttgactgtgtatgacgcttcagcattggcgaacccgtacctgtgtggaatcccatctttgagcgctctggctggtttctgtcatgactatgagcgtcgcttacagtccttaatcgggcagagcgtatatttccgtgggttggcgtggtacttggggcgctactcccttgttaccggcaagcatttacccgaaccgtcgaaatcagctgaccctaagtctgtttcagcgattcgccgcccaggcttgttggatgggcgttactgcgacctgggaatggaccttattatcgaagttcacattcccaccggcggatcgttgccgttcacgacatgtctggacttattgcgtgtagccctgcctgcacgtttcgctggcggctgccttcatcccccgtccttgtacgaggaatataattggtgcactgtctaccaagacaagagtacgctgtttacagtcctgtcacgtcttccgcgctacggctgttggatttaccccagtgatgcagacttgcgcagctttgaagagctgtcagaagcgttagccttggaccgtcgcttacgtccggttgctacaggctttgtgtttttagaagaacccgtggaacgtgcaggatcgatcgaaggccaacacgtttatgccgaaagtgcgatcggaactgccttgtgcattaatccagtggagatgcgtctggctggtaaaaagcgcttcttcggcgcaggtttttggcagttgaacgacgctaaaggtgccatcctgatgaatggttcagcaaacacggggtaaatgcatggaattatgtactcacttgtcatattcccgcagcctgtcacccggaaaggccgtcttcttctacaaaacggccgagtcagacttcgtccccttacgtatcgaggttgctaagatctccggacaaaaatgtggctatacagaaggttttgatgcaaatttgaagccaaaaaacattgagcgctacgagttggcgtacagtaacccccaaactatcgaggcttgttacgtcccgccgaacgtagatgaactgtattgccgtttctcgcttcgcgtcgaagctaattccatgcgtccctatgtttgtagtaatccagatgtacttcgtgtgatgattggcctggcgcaggcctaccagcgtctgggaggctacaacgaattagctcgccgttatagcgcgaatgtattacgtggaatttggttatggcgcaaccaatatactcaggggaccaaaattgaaatcaaaacatcattgggttctacctatcacatcccagacgctcgccgcctttcttggtcgggcgactggcctgaactggaacaaaagcaacttgagcagttgacctcagagatggcgaaagctctttcgcagcctgacatcttttggtttgcggacgttaccgcgtcactgaagacgggtttttgccaggaaatctttccttcacaaaaatttacagagcgtcctgatgatcactccgttgcctcccgccagcttgccaccgtggaatgttcagatggacaactggcagcctgcatcaacccgcagaagatcggcgcggctttgcaaaagatcgatgactggtgggcgaatgacgcggatctgcctctgcgtgtccacgaatacggggctaatcatgaagcattaacagcgttacgccaccctgcaacgggtcaagatttctaccaccttcttactaaggccgaacaatttgtgacggtgcttgaatcctctgaaggagggggcgttgagctgccgggagaggtacactatttgatggcagtgttggtgaagggtggattgtttcagaaagggaaggggagatgaccgaaaatcgctactttttcgccatccgttatttgagtgacgatgtggactgtggtcttttagctggacgttgcatttcgattcttcatgggtttcgccaagcgcaccctggcattcaaatcggtgtcgctttccccgaatggagtgatcgcgacctgggtcgtagcatcgcttttgtttcgacgaacaagagtctgttagaacgtttccgtgagcgttcctactttcaggtcatgcaggcggacaatttcttcgcgctgtctttggtactggaagtccccgatacttgtcagaacgttcgctttatccgtaatcaaaacttagccaagttgttcgtcggcgaacgccgtcgtcgtttggcgcgtgccaagcgccgcgctaaggcccgcggtgaagccttccaaccccatatgcctgatgagacaaaagtagttggtgtcttccactccgtattcatgcaatcagcaagctctggtcagtcttacatcctgcatattcagaaacatcgttatgagcgttcggaggattcgggttactcgagttatggcttagcaagtaacgacttatatacaggttatgtcccagatcttggtgcaatcttctctacgctgttttaagcttggctgttttggcggatgagagaagattttcagcctgatacagattaaatcagaacgcagaagcggtctgataaaacagaatttgcctggcggcagtagcgcggtggtcccacctgaccccatgccgaactcagaagtgaaacgccgtagcgccgatggtagtgtggggtctccccatgcgagagtagggaactgccaggcatcaaataaaacgaaaggctcagtcgaaagactgggcctttcgttttatctgttgtttgtcggtgaacgctctcctgagtaggacaaatccgccgggagcggatttgaacgttgcgaagcaacggcccggagggtggcgggcaggacgcccgccataaactgccaggcatcaaattaagcagaaggccatcctgacggatggcctttttgcgtttctacaaactcttttgtttatttttctaaatacattcaaatatgtatccgctcatggagctcgaattggccgcggcgttgtgacaatttaccgaacaactccgcggccgggaagccgatctcggcttgaacgaattgttaggtggcggtacttgggtcgatatcaaagtgcatcacttcttcccgtatgcccaactttgtatagagagccactgcgggatcgtcaccgtaatctgcttgcacgtagatcacataagcaccaagcgcgttggcctcatgcttgaggagattgatgagcgcggtggcaatgccctgcctccggtgct

SEQ ID NO: 5570 - DNA, 5352 bp, Artificial Sequence
  Description of Artificial Sequence: Synthetic polynucleotide
tctccatacccgtttttttgggctagcgaattcgagctcggtacccggggatcctctagagtcgacctgcaggcatgcaagcttggctgttttggcggatgagagaagattttcagcctgatacagattaaatcagaacgcagaagcggtctgataaaacagaatttgcctggcggcagtagcgcggtggtcccacctgaccccatgccgaactcagaagtgaaacgccgtagcgccgatggtagtgtggggtctccccatgcgagagtagggaactgccaggcatcaaataaaacgaaaggctcagtcgaaagactgggcctttcgttttatctgttgtttgtcggtgaacgctctcctgagtaggacaaatccgccgggagcggatttgaacgttgcgaagcaacggcccggagggtggcgggcaggacgcccgccataaactgccaggcatcaaattaagcagaaggccatcctgacggatggcctttttgcgtttctacaaactcttttgtttatttttctaaatacattcaaatatgtatccgctcatgagacaataaccctgataaatgcttcaataatattgaaaaaggaagagtatgagtattcaacatttccgtgtcgcccttattcccttttttgcggcattttgccttcctgtttttgctcacccagaaacgctggtgaaagtaaaagatgctgaagatcagttggggcaaactattaactggcgaactacttactctagcttcccggcaacaattaatagactggatggaggcggataaagttgcaggaccacttctgcgctcggcccttccggctggctggtttattgctgataaatctggagccggtgagcgtgggtctcgcggtatcattgcagcactggggccagatggtaagccctcccgtatcgtagttatctacacgacggggagtcaggcaactatggatgaacgaaatagacagatcgctgagataggtgcctcactgattaagcattggtaactgtcagaccaagtttactcatatatactttagattgatttacgcgccctgtagcggcgcattaagcgcggcgggtgtggtggttacgcgcagcgtgaccgctacacttgccagcgccctagcgcccgctcctttcgctttcttcccttcctttctcgccacgttcgccggctttccccgtcaagctctaaatcgggggctccctttagggttccgatttagtgctttacggcacctcgaccccaaaaaacttgatttgggtgatggttcacgtagtgggccatcgccctgatagacggtttttcgccctttgacgttggagtccacgttctttaatagtggactcttgttccaaacttgaacaacactcaaccctatctcgggctattcttttgatttataagggattttgccgatttcggcctattggttaaaaaatgagctgatttaacaaaaatttaacgcgaattttaacaaaatattaacgtttacaatttaaaaggatctaggtgaagatcctttttgataatctcatgaccaaaatcccttaacgtgagttttcgttccactgagcgtcagaccccgtagaaaagatcaaaggatcttcttgagatcctttttttctgcgcgtaatctgctgcttgcaaacaaaaaaaccaccgctaccagcggtggtttgtttgccggatcaagagctaccaactctttttccgaaggtaactggcttcagcagagcgcagataccaaatactgtccttctagtgtagccgtagttaggccaccacttcaagaactctgtagcaccgcctacatacctcgctctgctaatcctgttaccagtcaggcatttgagaagcacacggtcacactgcttccggtagtcaataaaccggtaaaccagcaatagacataagcggctatttaacgaccctgccctgaaccgacgaccgggtcgaatttgctttcgaatttctgccattcatccgcttattatcacttattcaggcgtagcaccaggcgtttaagggcaccaataactgccttaaaaaaattacgccccgccctgccactcatcgcagtactgttgtaattcattaagcattctgccgacatggaagccatcacagacggcatgatgaacctgaatcgccagcggcatcagcaccttgtcgccttgcgtataatatttgcccatggtgaaaacgggggcgaagaagttgtccatattggccacgtttaaatcaaaactggtgaaactcacccagggattggctgagacgaaaaacatattctcaataaaccctttagggaaataggccaggttttcaccgtaacacgccacatcttgcgaatatatgtgtagaaactgccggaaatcgtcgtggtattcactccagagcgatgaaaacgtttcagtttgctcatggaaaacggtgtaacaagggtgaacactatcccatatcaccagctcaccgtctttcattgccatacggaattccggatgagcattcatcaggcgggcaagaatgtgaataaaggccggataaaacttgtgcttatttttctttacggtctttaaaaaggccgtaatatccagctgaacggtctggttataggtacattgagcaactgactgaaatgcctcaaaatgttctttacgatgccattgggatatatcaacggtggtatatccagtgatttttttctccattttagcttccttagctcctgaaaatctcgataactcaaaaaatacgcccggtagtgatcttatttcattatggtgaaagttggaacctcttacgtgccgatcaacgtctcattttcgccaaaagttggcccagggcttcccggtatcaacagggacaccaggatttatttattctgcgaagtgatcttccgtcacaggtatttattcggcgcaaagtgcgtcgggtgatgctgccaacttactgatttagtgtatgatggtgtttttgaggtgctccagtggcttctgtttctatcagctgtccctcctgttcagctactgacggggtggtgcgtaacggcaaaagcaccgccggacatcagcgctagcggagtgtatactggcttactatgttggcactgatgagggtgtcagtgaagtgcttcatgtggcaggagaaaaaaggctgcaccggtgcgtcagcagaatatgtgatacaggatatattccgcttcctcgctcactgactcgctacgctcggtcgttcgactgcggcgagcggaaatggcttacgaacggggcggagatttcctggaagatgccaggaagatacttaacagggaagtgagagggccgcggcaaagccgtttttccataggctccgcccccctgacaagcatcacgaaatctgacgctcaaatcagtggtggcgaaacccgacaggactataaagataccaggcgtttccccctggcggctccctcgtgcgctctcctgttcctgcctttcggtttaccggtgtcattccgctgttatggccgcgtttgtctcattccacgcctgacactcagttccgggtaggcagttcgctccaagctggactgtatgcacgaaccccccgttcagtccgaccgctgcgccttatccggtaactatcgtcttgagtccaacccggaaagacatgcaaaagcaccactggcagcagccactggtaattgatttagaggagttagtcttgaagtcatgcgccggttaaggctaaactgaaaggacaagttttggtgactgcgctcctccaagccagttacctcggttcaaagagttggtagctcagagaaccttcgaaaaaccgccctgcaaggcggttttttcgttttcagagcaagagattacgcgcagaccaaaacgatctcaagaagatcatcttattaatcagataaaatatttgctcatgagcccgaagtggcgagcccgatcttccccatcggtgatgtcggcgatataggcgccagcaaccgcacctgtggcgccggtgatgccggccacgatgcgtccggcgtagaggatctgctcatgtttgacagcttatcatcgatgcataatgtgcctgtcaaatggacgaagcagggattctgcaaaccctatgctactccgtcaagccgtcaattgtctgattcgttaccaattatgacaacttgacggctacatcattcactttttcttcacaaccggcacggaactcgctcgggctggccccggtgcattttttaaatacccgcgagaaatagagttgatcgtcaaaaccaacattgcgaccgacggtggcgataggcatccgggtggtgctcaaaagcagcttcgcctggctgatacgttggtcctcgcgccagcttaagacgctaatccctaactgctggcggaaaagatgtgacagacgcgacggcgacaagcaaacatgctgtgcgacgctggcgatatcaaaattgctgtctgccaggtgatcgctgatgtactgacaagcctcgcgtacccgattatccatcggtggatggagcgactcgttaatcgcttccatgcgccgcagtaacaattgctcaagcagatttatcgccagcagctccgaatagcgcccttccccttgcccggcgttaatgatttgcccaaacaggtcgctgaaatgcggctggtgcgcttcatccgggcgaaagaaccccgtattggcaaatattgacggccagttaagccattcatgccagtaggcgcgcggacgaaagtaaacccactggtgataccattcgcgagcctccggatgacgaccgtagtgatgaatctctcctggcgggaacagcaaaatatcacccggtcggcaaacaaattctcgtccctgatttttcaccaccccctgaccgcgaatggtgagattgagaatataacctttcattcccagcggtcggtcgataaaaaaatcgagataaccgttggcctcaatcggcgttaaacccgccaccagatgggcattaaacgagtatcccggcagcaggggatcattttgcgcttcagccatacttttcatactcccgccattcagagaagaaaccaattgtccatattgcatcagacattgccgtcactgcgtcttttactggctcttctcgctaaccaaaccggtaaccccgcttattaaaagcattctgtaacaaagcgggaccaaagccatgacaaaaacgcgtaacaaaagtgtctataatcacggcagaaaagtccacattgattatttgcacggcgtcacactttgctatgccatagcatttttatccataagattagcggatcctacctgacgctttttatcgcaactctctactgtt

SEQ ID NO: 5571 - DNA, 5222 bp, Artificial Sequence
  Description of Artificial Sequence: Synthetic polynucleotide
gcagcaggggatcattttgcgcttcagccatacttttcatactcccgccattcagagaagaaaccaattgtccatattgcatcagacattgccgtcactgcgtcttttactggctcttctcgctaaccaaaccggtaaccccgcttattaaaagcattctgtaacaaagcgggaccaaagccatgacaaaaacgcgtaacaaaagtgtctataatcacggcagaaaagtccacattgattatttgcacggcgtcacactttgctatgccatagcatttttatccataagattagcggatcctacctgacgctttttatcgcaactctctactgtttctccatacccgtttttttgggctagcgaattcgagctcggtacgtgaactgccgtataggcagccaagaaatgagacccacgatttgtaataacagagtgtcttgtatttttaaagaaagtctatttaatacaagtgattatattaattaacggtaagcatcagcgggtgacaaaacgagcatgcttactaataaaatgttaacctctgaggaagaattgtgaaactatcactaatggtagctatatcgaagaatggagttatcgggaatggccctgatattccatggagtgccaaaggtgaacagctcctgtttaaagctattacctataaccaatggctgttggttggacgcaagacttttgaatcaatgggagcattacccaaccgaaagtatgcggtcgtaacacgttcaagttttacatctgacaatgagaacgtattgatctttccatcaattaaagatgctttaaccaacctaaagaaaataacggatcatgtcattgtttcaggtggtggggagatatacaaaagcctgatcgatcaagtagatacactacatatatctacaatagacatcgagccggaaggtgatgtttactttcctgaaatccccagcaattttaggccagtttttacccaagacttcgcctctaacataaattatagttaccaaatctggcaaaagggttaacaagtggcagcaacggattcgcaaacctgtcacgccttttgtgccaaaagccgcgccaggtttgcgatccgctgtgccaggcgttaggcgtcatatgaagatttcggtgatccctgagcaggtctcgtgaactgccgtataggcagccaagattaggactggaagaaatcatccaagttggggactattttctgccgtaaaggcagatattattatgtagcccagtcttgtacccggggatcctctagagtcgacctgcaggcatgcaagcttggctgttttggcggatgagagaagattttcagcctgatacagattaaatcagaacgcagaagcggtctgataaaacagaatttgcctggcggcagtagcgcggtggtcccacctgaccccatgccgaactcagaagtgaaacgccgtagcgccgatggtagtgtggggactccccatgcgagagtagggaactgccaggcatcaaataaaacgaaaggctcagtcgaaagactgggcctttcgttttatctgttgtttgtcggtgaacgctctcctgagtaggacaaatccgccgggagcggatttgaacgttgcgaagcaacggcccggagggtggcgggcaggacgcccgccataaactgccaggcatcaaattaagcagaaggccatcctgacggatggcctttttgcgtttctacaaactcttttgtttatttttctaaatattccgcttcctcgctcactgacccgctgcgctcggtcgttcggctgcggcgagcggtatcaggggattccttaaggtatactttccgctgcataaccctgcttcggggtcattatagcgattttttcggtatatccatcctttttcgcacgatatacaggattttgccaaagggttcgtgtagactttccttggtgtatccaacggcgtcagccgggcaggataggtgaagtaggcccacccgcgagcgggtgttccttcttcactgtcccttattcgcacctggcggtgctcaacgggaatcctgctctgcgaggctggccgataagctctgataacgcaggaaagaacatgggcagttcaacctgttgatagtacgtactaagctctcatgtttcacgtactaagctctcaagtgaccgggtcgaatttgctttcgaatttctgccattcatccgcttattatcacttattcaggcgtagcaccaggcgtttaagggcaccaataactgccttaaaaaaattacgccccgccctgccactcatcgcagtactgttgtaattcattaagcattctgccgacatggaagccatcacagacggcatgatgaacctgaatcgccagcggcatcagcaccttgtcgccttgcgtataatatttgcccatggtgaaaacgggggcgaagaagttgtccatattggccacgtttaaatcaaaactggtgaaactcacccagggattggctgagacgaaaaacatattctcaataaaccctttagggaaataggccaggttttcaccgtaacacgccacatcttgcgaatatatgtgtagaaactgccggaaatcgtcgtggtattcactccagagcgatgaaaacgtttcagtttgctcatggaaaacggtgtaacaagggtgaacactatcccatatcaccagctcaccgtctttcattgccatacggaattccggatgagcattcatcaggcgggcaagaatgtgaataaaggccggataaaacttgtgcttatttttctttacggtctttaaaaaggccgtaatatccagctgaacggtctggttataggtacattgagcaactgactgaaatgcctcaaaatgttctttacgatgccattgggatatatcaacggtggtatatccagtgatttttttctccattttagcttccttagctcctgaaaatctcgataactcaaaaaatacgcccggtagtgatcttatttcattatggtgaaagttggaacctcttacgtgccgatcaacgtctcattttcgccaaaagttggcccagggcttcccggtatcaacagggacaccaggatttatttattctgcgaagtgatcttccgtcacaggtatttattcggcgcaaagtgcgtcgggtgatgctgccaacttactgatttagtgtatgatggtgtttttgaggtgctccagtggcttctgtttctatcagctgtccctcctgttcagctactgacggggtggtgcgtaacggcaaaagcaccgccggacatcagcgctagcggagtgtatactggcttactatgttggcactgatgagggtgtcagtgaagtgcttcatgtggcaggagaaaaaaggctgcaccggtgcgtcagcagaatatgtgatacaggatatattccgcttcctcgctcactgactcgctacgctcggtcgttcgactgcggcgagcggaaatggcttacgaacggggcggagatttcctggaagatgccaggaagatacttaacagggaagtgagagggccgcggcaaagccgtttttccataggctccgcccccctgacaagcatcacgaaatctgacgctcaaatcagtggtggcgaaacccgacaggactataaagataccaggcgtttccccctggcggctccctcgtgcgctctcctgttcctgcctttcggtttaccggtgtcattccgctgttatggccgcgtttgtctcattccacgcctgacactcagttccgggtaggcagttcgctccaagctggactgtatgcacgaaccccccgttcagtccgaccgctgcgccttatccggtaactatcgtcttgagtccaacccggaaagacatgcaaaagcaccactggcagcagccactggtaattgatttagaggagttagtcttgaagtcatgcgccggttaaggctaaactgaaaggacaagttttggtgactgcgctcctccaagccagttacctcggttcaaagagttggtagctcagagaaccttcgaaaaaccgccctgcaaggcggttttttcgttttcagagcaagagattacgcgcagaccaaaacgatctcaagaagatcatcttattaatcagataaaatatttgctcatgagcccgaagtggcgagcccgatcttccccatcggtgatgtcggcgatataggcgccagcaaccgcacctgtggcgccggtgatgccggccacgatgcgtccggcgtagaggatctgctcatgtttgacagcttatcatcgatgcataatgtgcctgtcaaatggacgaagcagggattctgcaaaccctatgctactccgtcaagccgtcaattgtctgattcgttaccaattatgacaacttgacggctacatcattcactttttcttcacaaccggcacggaactcgctcgggctggccccggtgcattttttaaatacccgcgagaaatagagttgatcgtcaaaaccaacattgcgaccgacggtggcgataggcatccgggtggtgctcaaaagcagcttcgcctggctgatacgttggtcctcgcgccagcttaagacgctaatccctaactgctggcggaaaagatgtgacagacgcgacggcgacaagcaaacatgctgtgcgacgctggcgatatcaaaattgctgtctgccaggtgatcgctgatgtactgacaagcctcgcgtacccgattatccatcggtggatggagcgactcgttaatcgcttccatgcgccgcagtaacaattgctcaagcagatttatcgccagcagctccgaatagcgcccttccccttgcccggcgttaatgatttgcccaaacaggtcgctgaaatgcggctggtgcgcttcatccgggcgaaagaaccccgtattggcaaatattgacggccagttaagccattcatgccagtaggcgcgcggacgaaagtaaacccactggtgataccattcgcgagcctccggatgacgaccgtagtgatgaatctctcctggcgggaacagcaaaatatcacccggtcggcaaacaaattctcgtccctgatttttcaccaccccctgaccgcgaatggtgagattgagaatataacctttcattcccagcggtcggtcgataaaaaaatcgagataaccgttggcctcaatcggcgttaaacccgccaccagatgggcattaaacgagtatcccg

SEQ ID NO: 5572 - DNA, 4506 bp, Artificial Sequence
  Description of Artificial Sequence: Synthetic polynucleotide
gcagcaggggatcattttgcgcttcagccatacttttcatactcccgccattcagagaagaaaccaattgtccatattgcatcagacattgccgtcactgcgtcttttactggctcttctcgctaaccaaaccggtaaccccgcttattaaaagcattctgtaacaaagcgggaccaaagccatgacaaaaacgcgtaacaaaagtgtctataatcacggcagaaaagtccacattgattatttgcacggcgtcacactttgctatgccatagcatttttatccataagattagcggatcctacctgacgctttttatcgcaactctctactgtttctccatacccgtttttttgggctagcgaattcgagctcggtacgtgaactgccgtataggcagccaagaaacggaaggggagggcaccctgcttattgataatgtgaactgccgtataggcagccaagattaggactggaagaaatcatccaagttggggactattttctgccgtaaaggcagatattattatgtagcccagtcttgtacccggggatcctctagagtcgacctgcaggcatgcaagcttggctgttttggcggatgagagaagattttcagcctgatacagattaaatcagaacgcagaagcggtctgataaaacagaatttgcctggcggcagtagcgcggtggtcccacctgaccccatgccgaactcagaagtgaaacgccgtagcgccgatggtagtgtggggactccccatgcgagagtagggaactgccaggcatcaaataaaacgaaaggctcagtcgaaagactgggcctttcgttttatctgttgtttgtcggtgaacgctctcctgagtaggacaaatccgccgggagcggatttgaacgttgcgaagcaacggcccggagggtggcgggcaggacgcccgccataaactgccaggcatcaaattaagcagaaggccatcctgacggatggcctttttgcgtttctacaaactcttttgtttatttttctaaatattccgcttcctcgctcactgacccgctgcgctcggtcgttcggctgcggcgagcggtatcaggggattccttaaggtatactttccgctgcataaccctgcttcggggtcattatagcgattttttcggtatatccatcctttttcgcacgatatacaggattttgccaaagggttcgtgtagactttccttggtgtatccaacggcgtcagccgggcaggataggtgaagtaggcccacccgcgagcgggtgttccttcttcactgtcccttattcgcacctggcggtgctcaacgggaatcctgctctgcgaggctggccgataagctctgataacgcaggaaagaacatgggcagttcaacctgttgatagtacgtactaagctctcatgtttcacgtactaagctctcaagtgaccgggtcgaatttgctttcgaatttctgccattcatccgcttattatcacttattcaggcgtagcaccaggcgtttaagggcaccaataactgccttaaaaaaattacgccccgccctgccactcatcgcagtactgttgtaattcattaagcattctgccgacatggaagccatcacagacggcatgatgaacctgaatcgccagcggcatcagcaccttgtcgccttgcgtataatatttgcccatggtgaaaacgggggcgaagaagttgtccatattggccacgtttaaatcaaaactggtgaaactcacccagggattggctgagacgaaaaacatattctcaataaaccctttagggaaataggccaggttttcaccgtaacacgccacatcttgcgaatatatgtgtagaaactgccggaaatcgtcgtggtattcactccagagcgatgaaaacgtttcagtttgctcatggaaaacggtgtaacaagggtgaacactatcccatatcaccagctcaccgtctttcattgccatacggaattccggatgagcattcatcaggcgggcaagaatgtgaataaaggccggataaaacttgtgcttatttttctttacggtctttaaaaaggccgtaatatccagctgaacggtctggttataggtacattgagcaactgactgaaatgcctcaaaatgttctttacgatgccattgggatatatcaacggtggtatatccagtgatttttttctccattttagcttccttagctcctgaaaatctcgataactcaaaaaatacgcccggtagtgatcttatttcattatggtgaaagttggaacctcttacgtgccgatcaacgtctcattttcgccaaaagttggcccagggcttcccggtatcaacagggacaccaggatttatttattctgcgaagtgatcttccgtcacaggtatttattcggcgcaaagtgcgtcgggtgatgctgccaacttactgatttagtgtatgatggtgtttttgaggtgctccagtggcttctgtttctatcagctgtccctcctgttcagctactgacggggtggtgcgtaacggcaaaagcaccgccggacatcagcgctagcggagtgtatactggcttactatgttggcactgatgagggtgtcagtgaagtgcttcatgtggcaggagaaaaaaggctgcaccggtgcgtcagcagaatatgtgatacaggatatattccgcttcctcgctcactgactcgctacgctcggtcgttcgactgcggcgagcggaaatggcttacgaacggggcggagatttcctggaagatgccaggaagatacttaacagggaagtgagagggccgcggcaaagccgtttttccataggctccgcccccctgacaagcatcacgaaatctgacgctcaaatcagtggtggcgaaacccgacaggactataaagataccaggcgtttccccctggcggctccctcgtgcgctctcctgttcctgcctttcggtttaccggtgtcattccgctgttatggccgcgtttgtctcattccacgcctgacactcagttccgggtaggcagttcgctccaagctggactgtatgcacgaaccccccgttcagtccgaccgctgcgccttatccggtaactatcgtcttgagtccaacccggaaagacatgcaaaagcaccactggcagcagccactggtaattgatttagaggagttagtcttgaagtcatgcgccggttaaggctaaactgaaaggacaagttttggtgactgcgctcctccaagccagttacctcggttcaaagagttggtagctcagagaaccttcgaaaaaccgccctgcaaggcggttttttcgttttcagagcaagagattacgcgcagaccaaaacgatctcaagaagatcatcttattaatcagataaaatatttgctcatgagcccgaagtggcgagcccgatcttccccatcggtgatgtcggcgatataggcgccagcaaccgcacctgtggcgccggtgatgccggccacgatgcgtccggcgtagaggatctgctcatgtttgacagcttatcatcgatgcataatgtgcctgtcaaatggacgaagcagggattctgcaaaccctatgctactccgtcaagccgtcaattgtctgattcgttaccaattatgacaacttgacggctacatcattcactttttcttcacaaccggcacggaactcgctcgggctggccccggtgcattttttaaatacccgcgagaaatagagttgatcgtcaaaaccaacattgcgaccgacggtggcgataggcatccgggtggtgctcaaaagcagcttcgcctggctgatacgttggtcctcgcgccagcttaagacgctaatccctaactgctggcggaaaagatgtgacagacgcgacggcgacaagcaaacatgctgtgcgacgctggcgatatcaaaattgctgtctgccaggtgatcgctgatgtactgacaagcctcgcgtacccgattatccatcggtggatggagcgactcgttaatcgcttccatgcgccgcagtaacaattgctcaagcagatttatcgccagcagctccgaatagcgcccttccccttgcccggcgttaatgatttgcccaaacaggtcgctgaaatgcggctggtgcgcttcatccgggcgaaagaaccccgtattggcaaatattgacggccagttaagccattcatgccagtaggcgcgcggacgaaagtaaacccactggtgataccattcgcgagcctccggatgacgaccgtagtgatgaatctctcctggcgggaacagcaaaatatcacccggtcggcaaacaaattctcgtccctgatttttcaccaccccctgaccgcgaatggtgagattgagaatataacctttcattcccagcggtcggtcgataaaaaaatcgagataaccgttggcctcaatcggcgttaaacccgccaccagatgggcattaaacgagtatcccg

SEQ ID NO: 5573 - DNA, 5948 bp, Artificial Sequence
  Description of Artificial Sequence: Synthetic polynucleotide
cggtgagcgtgggactcgcggtatcattgcagcactggggccagatggtaagccctcccgtatcgtagttatctacacgacggggagtcaggcaactatggatgaacgaaatagacagatcgctgagataggtgcctcactgattaagcattggtaactgtcagaccaagtttactcatatatactttagattgatttacgcgccctgtagcggcgcattaagcgcggcgggtgtggtggttacgcgcagcgtgaccgctacacttgccagcgccctagcgcccgctcctttcgctttcttcccttcctttctcgccacgttcgccggctttccccgtcaagctctaaatcgggggctccctttagggttccgatttagtgctttacggcacctcgaccccaaaaaacttgatttgggtgatggttcacgtagtgggccatcgccctgatagacggtttttcgccctttgacgttggagtccacgttctttaatagtggactcttgttccaaacttgaacaacactcaaccctatctcgggctattcttttgatttataagggattttgccgatttcggcctattggttaaaaaatgagctgatttaacaaaaatttaacgcgaattttaacaaaatattaacgtttacaatttaaaaggatctaggtgaagatcctttttgataatctcatgaccaaaatcccttaacgtgagttttcgttccactgagcgtcagaccccgtagaaaagatcaaaggatcttcttgagatcctttttttctgcgcgtaatctgctgcttgcaaacaaaaaaaccaccgctaccagcggtggtttgtttgccggatcaagagctaccaactctttttccgaaggtaactggcttcagcagagcgcagataccaaatactgtccttctagtgtagccgtagttaggccaccacttcaagaactctgtagcaccgcctacatacctcgctctgctaatcctgttaccagtcaggcatttgagaagcacacggtcacactgcttccggtagtcaataaaccggtaaaccagcaatagacataagcggctatttaacgaccctgccctgaaccgacgaccgggtcgaatttgctttcgaatttctgccattcatccgcttattatcacttattcaggcgtagcaccaggcgtttaagggcaccaataactgccttaaaaaaattacgccccgccctgccactcatcgcagtactgttgtaattcattaagcattctgccgacatggaagccatcacagacggcatgatgaacctgaatcgccagcggcatcagcaccttgtcgccttgcgtataatatttgcccatggtgaaaacgggggcgaagaagttgtccatattggccacgtttaaatcaaaactggtgaaactcacccagggattggctgagacgaaaaacatattctcaataaaccctttagggaaataggccaggttttcaccgtaacacgccacatcttgcgaatatatgtgtagaaactgccggaaatcgtcgtggtattcactccagagcgatgaaaacgtttcagtttgctcatggaaaacggtgtaacaagggtgaacactatcccatatcaccagctcaccgtctttcattgccatacggaattccggatgagcattcatcaggcgggcaagaatgtgaataaaggccggataaaacttgtgcttatttttctttacggtctttaaaaaggccgtaatatccagctgaacggtctggttataggtacattgagcaactgactgaaatgcctcaaaatgttctttacgatgccattgggatatatcaacggtggtatatccagtgatttttttctccattttagcttccttagctcctgaaaatctcgataactcaaaaaatacgcccggtagtgatcttatttcattatggtgaaagttggaacctcttacgtgccgatcaacgtctcattttcgccaaaagttggcccagggcttcccggtatcaacagggacaccaggatttatttattctgcgaagtgatcttccgtcacaggtatttattcggcgcaaagtgcgtcgggtgatgctgccaacttactgatttagtgtatgatggtgtttttgaggtgctccagtggcttctgtttctatcagctgtccctcctgttcagctactgacggggtggtgcgtaacggcaaaagcaccgccggacatcagcgctagcggagtgtatactggcttactatgttggcactgatgagggtgtcagtgaagtgcttcatgtggcaggagaaaaaaggctgcaccggtgcgtcagcagaatatgtgatacaggatatattccgcttcctcgctcactgactcgctacgctcggtcgttcgactgcggcgagcggaaatggcttacgaacggggcggagatttcctggaagatgccaggaagatacttaacagggaagtgagagggccgcggcaaagccgtttttccataggctccgcccccctgacaagcatcacgaaatctgacgctcaaatcagtggtggcgaaacccgacaggactataaagataccaggcgtttccccctggcggctccctcgtgcgctctcctgttcctgcctttcggtttaccggtgtcattccgctgttatggccgcgtttgtctcattccacgcctgacactcagttccgggtaggcagttcgctccaagctggactgtatgcacgaaccccccgttcagtccgaccgctgcgccttatccggtaactatcgtcttgagtccaacccggaaagacatgcaaaagcaccactggcagcagccactggtaattgatttagaggagttagtcttgaagtcatgcgccggttaaggctaaactgaaaggacaagttttggtgactgcgctcctccaagccagttacctcggttcaaagagttggtagctcagagaaccttcgaaaaaccgccctgcaaggcggttttttcgttttcagagcaagagattacgcgcagaccaaaacgatctcaagaagatcatcttattaatcagataaaatatttgctcatgagcccgaagtggcgagcccgatcttccccatcggtgatgtcggcgatataggcgccagcaaccgcacctgtggcgccggtgatgccggccacgatgcgtccggcgtagaggatctgctcatgtttgacagcttatcatcgatgcataatgtgcctgtcaaatggacgaagcagggattctgcaaaccctatgctactccgtcaagccgtcaattgtctgattcgttaccaattatgacaacttgacggctacatcattcactttttcttcacaaccggcacggaactcgctcgggctggccccggtgcattttttaaatacccgcgagaaatagagttgatcgtcaaaaccaacattgcgaccgacggtggcgataggcatccgggtggtgctcaaaagcagcttcgcctggctgatacgttggtcctcgcgccagcttaagacgctaatccctaactgctggcggaaaagatgtgacagacgcgacggcgacaagcaaacatgctgtgcgacgctggcgatatcaaaattgctgtctgccaggtgatcgctgatgtactgacaagcctcgcgtacccgattatccatcggtggatggagcgactcgttaatcgcttccatgcgccgcagtaacaattgctcaagcagatttatcgccagcagctccgaatagcgcccttccccttgcccggcgttaatgatttgcccaaacaggtcgctgaaatgcggctggtgcgcttcatccgggcgaaagaaccccgtattggcaaatattgacggccagttaagccattcatgccagtaggcgcgcggacgaaagtaaacccactggtgataccattcgcgagcctccggatgacgaccgtagtgatgaatctctcctggcgggaacagcaaaatatcacccggtcggcaaacaaattctcgtccctgatttttcaccaccccctgaccgcgaatggtgagattgagaatataacctttcattcccagcggtcggtcgataaaaaaatcgagataaccgttggcctcaatcggcgttaaacccgccaccagatgggcattaaacgagtatcccggcagcaggggatcattttgcgcttcagccatacttttcatactcccgccattcagagaagaaaccaattgtccatattgcatcagacattgccgtcactgcgtcttttactggctcttctcgctaaccaaaccggtaaccccgcttattaaaagcattctgtaacaaagcgggaccaaagccatgacaaaaacgcgtaacaaaagtgtctataatcacggcagaaaagtccacattgattatttgcacggcgtcacactttgctatgccatagcatttttatccataagattagcggatcctacctgacgctttttatcgcaactctctactgtttctccatacccgtttttttgggctagcgaattcgagctcggtacccggggatgtgaactgccgtataggcagccaagaaatgagacccacgatttgtaataacagagtgtcttgtatttttaaagaaagtctatttaatacaagtgattatattaattaacggtaagcatcagcgggtgacaaaacgagcatgcttactaataaaatgttaacctctgaggaagaattgtgaaactatcactaatggtagctatatcgaagaatggagttatcgggaatggccctgatattccatggagtgccaaaggtgaacagctcctgtttaaagctattacctataaccaatggctgttggttggacgcaagacttttgaatcaatgggagcattacccaaccgaaagtatgcggtcgtaacacgttcaagttttacatctgacaatgagaacgtattgatctttccatcaattaaagatgctttaaccaacctaaagaaaataacggatcatgtcattgtttcaggtggtggggagatatacaaaagcctgatcgatcaagtagatacactacatatatctacaatagacatcgagccggaaggtgatgtttactttcctgaaatccccagcaattttaggccagtttttacccaagacttcgcctctaacataaattatagttaccaaatctggcaaaagggttaacaagtggcagcaacggattcgcaaacctgtcacgccttttgtgccaaaagccgcgccaggtttgcgatccgctgtgccaggcgttaggcgtcatatgaagatttcggtgatccctgagcaggtctcgtgaactgccgtataggcagccaagatttgcgagagtagggaactgccaggcatcaaataaaacgaaaggctcagtcgaaagactgggcctttcgttttatctgttgtttgtcggtgaacgctctcctgagtaggacaaatccgccgggagcggatttgaacgttgcgaagcaacggcccggagggtggcgggcaggacgcccgccataaactgccaggcatcaaattaagcagaaggccatcctgacggatggcctttttgcgtttctacaaactcttttgtttatttttctaaatacattcaaatatgtatccgctcatgagacaataaccctgataaatgcttcaataatattgaaaaaggaagagtatgagtattcaacatttccgtgtcgcccttattcccttttttgcggcattttgccttcctgtttttgctcacccagaaacgctggtgaaagtaaaagatgctgaagatcagttggggcaaactattaactggcgaactacttactctagcttcccggcaacaattaatagactggatggaggcggataaagttgcaggaccacttctgcgctcggcccttccggctggctggtttattgctgataaatctggagc

SEQ ID NO: 5574 - DNA, 5232 bp, Artificial Sequence
  Description of Artificial Sequence: Synthetic polynucleotide
cggtgagcgtgggactcgcggtatcattgcagcactggggccagatggtaagccctcccgtatcgtagttatctacacgacggggagtcaggcaactatggatgaacgaaatagacagatcgctgagataggtgcctcactgattaagcattggtaactgtcagaccaagtttactcatatatactttagattgatttacgcgccctgtagcggcgcattaagcgcggcgggtgtggtggttacgcgcagcgtgaccgctacacttgccagcgccctagcgcccgctcctttcgctttcttcccttcctttctcgccacgttcgccggctttccccgtcaagctctaaatcgggggctccctttagggttccgatttagtgctttacggcacctcgaccccaaaaaacttgatttgggtgatggttcacgtagtgggccatcgccctgatagacggtttttcgccctttgacgttggagtccacgttctttaatagtggactcttgttccaaacttgaacaacactcaaccctatctcgggctattcttttgatttataagggattttgccgatttcggcctattggttaaaaaatgagctgatttaacaaaaatttaacgcgaattttaacaaaatattaacgtttacaatttaaaaggatctaggtgaagatcctttttgataatctcatgaccaaaatcccttaacgtgagttttcgttccactgagcgtcagaccccgtagaaaagatcaaaggatcttcttgagatcctttttttctgcgcgtaatctgctgcttgcaaacaaaaaaaccaccgctaccagcggtggtttgtttgccggatcaagagctaccaactctttttccgaaggtaactggcttcagcagagcgcagataccaaatactgtccttctagtgtagccgtagttaggccaccacttcaagaactctgtagcaccgcctacatacctcgctctgctaatcctgttaccagtcaggcatttgagaagcacacggtcacactgcttccggtagtcaataaaccggtaaaccagcaatagacataagcggctatttaacgaccctgccctgaaccgacgaccgggtcgaatttgctttcgaatttctgccattcatccgcttattatcacttattcaggcgtagcaccaggcgtttaagggcaccaataactgccttaaaaaaattacgccccgccctgccactcatcgcagtactgttgtaattcattaagcattctgccgacatggaagccatcacagacggcatgatgaacctgaatcgccagcggcatcagcaccttgtcgccttgcgtataatatttgcccatggtgaaaacgggggcgaagaagttgtccatattggccacgtttaaatcaaaactggtgaaactcacccagggattggctgagacgaaaaacatattctcaataaaccctttagggaaataggccaggttttcaccgtaacacgccacatcttgcgaatatatgtgtagaaactgccggaaatcgtcgtggtattcactccagagcgatgaaaacgtttcagtttgctcatggaaaacggtgtaacaagggtgaacactatcccatatcaccagctcaccgtctttcattgccatacggaattccggatgagcattcatcaggcgggcaagaatgtgaataaaggccggataaaacttgtgcttatttttctttacggtctttaaaaaggccgtaatatccagctgaacggtctggttataggtacattgagcaactgactgaaatgcctcaaaatgttctttacgatgccattgggatatatcaacggtggtatatccagtgatttttttctccattttagcttccttagctcctgaaaatctcgataactcaaaaaatacgcccggtagtgatcttatttcattatggtgaaagttggaacctcttacgtgccgatcaacgtctcattttcgccaaaagttggcccagggcttcccggtatcaacagggacaccaggatttatttattctgcgaagtgatcttccgtcacaggtatttattcggcgcaaagtgcgtcgggtgatgctgccaacttactgatttagtgtatgatggtgtttttgaggtgctccagtggcttctgtttctatcagctgtccctcctgttcagctactgacggggtggtgcgtaacggcaaaagcaccgccggacatcagcgctagcggagtgtatactggcttactatgttggcactgatgagggtgtcagtgaagtgcttcatgtggcaggagaaaaaaggctgcaccggtgcgtcagcagaatatgtgatacaggatatattccgcttcctcgctcactgactcgctacgctcggtcgttcgactgcggcgagcggaaatggcttacgaacggggcggagatttcctggaagatgccaggaagatacttaacagggaagtgagagggccgcggcaaagccgtttttccataggctccgcccccctgacaagcatcacgaaatctgacgctcaaatcagtggtggcgaaacccgacaggactataaagataccaggcgtttccccctggcggctccctcgtgcgctctcctgttcctgcctttcggtttaccggtgtcattccgctgttatggccgcgtttgtctcattccacgcctgacactcagttccgggtaggcagttcgctccaagctggactgtatgcacgaaccccccgttcagtccgaccgctgcgccttatccggtaactatcgtcttgagtccaacccggaaagacatgcaaaagcaccactggcagcagccactggtaattgatttagaggagttagtcttgaagtcatgcgccggttaaggctaaactgaaaggacaagttttggtgactgcgctcctccaagccagttacctcggttcaaagagttggtagctcagagaaccttcgaaaaaccgccctgcaaggcggttttttcgttttcagagcaagagattacgcgcagaccaaaacgatctcaagaagatcatcttattaatcagataaaatatttgctcatgagcccgaagtggcgagcccgatcttccccatcggtgatgtcggcgatataggcgccagcaaccgcacctgtggcgccggtgatgccggccacgatgcgtccggcgtagaggatctgctcatgtttgacagcttatcatcgatgcataatgtgcctgtcaaatggacgaagcagggattctgcaaaccctatgctactccgtcaagccgtcaattgtctgattcgttaccaattatgacaacttgacggctacatcattcactttttcttcacaaccggcacggaactcgctcgggctggccccggtgcattttttaaatacccgcgagaaatagagttgatcgtcaaaaccaacattgcgaccgacggtggcgataggcatccgggtggtgctcaaaagcagcttcgcctggctgatacgttggtcctcgcgccagcttaagacgctaatccctaactgctggcggaaaagatgtgacagacgcgacggcgacaagcaaacatgctgtgcgacgctggcgatatcaaaattgctgtctgccaggtgatcgctgatgtactgacaagcctcgcgtacccgattatccatcggtggatggagcgactcgttaatcgcttccatgcgccgcagtaacaattgctcaagcagatttatcgccagcagctccgaatagcgcccttccccttgcccggcgttaatgatttgcccaaacaggtcgctgaaatgcggctggtgcgcttcatccgggcgaaagaaccccgtattggcaaatattgacggccagttaagccattcatgccagtaggcgcgcggacgaaagtaaacccactggtgataccattcgcgagcctccggatgacgaccgtagtgatgaatctctcctggcgggaacagcaaaatatcacccggtcggcaaacaaattctcgtccctgatttttcaccaccccctgaccgcgaatggtgagattgagaatataacctttcattcccagcggtcggtcgataaaaaaatcgagataaccgttggcctcaatcggcgttaaacccgccaccagatgggcattaaacgagtatcccggcagcaggggatcattttgcgcttcagccatacttttcatactcccgccattcagagaagaaaccaattgtccatattgcatcagacattgccgtcactgcgtcttttactggctcttctcgctaaccaaaccggtaaccccgcttattaaaagcattctgtaacaaagcgggaccaaagccatgacaaaaacgcgtaacaaaagtgtctataatcacggcagaaaagtccacattgattatttgcacggcgtcacactttgctatgccatagcatttttatccataagattagcggatcctacctgacgctttttatcgcaactctctactgtttctccatacccgtttttttgggctagcgaattcgagctcggtacccggggatgtgaactgccgtataggcagccaagaaacggaaggggagggcaccctgcttattgataatgtgaactgccgtataggcagccaagatttgcgagagtagggaactgccaggcatcaaataaaacgaaaggctcagtcgaaagactgggcctttcgttttatctgttgtttgtcggtgaacgctctcctgagtaggacaaatccgccgggagcggatttgaacgttgcgaagcaacggcccggagggtggcgggcaggacgcccgccataaactgccaggcatcaaattaagcagaaggccatcctgacggatggcctttttgcgtttctacaaactcttttgtttatttttctaaatacattcaaatatgtatccgctcatgagacaataaccctgataaatgcttcaataatattgaaaaaggaagagtatgagtattcaacatttccgtgtcgcccttattcccttttttgcggcattttgccttcctgtttttgctcacccagaaacgctggtgaaagtaaaagatgctgaagatcagttggggcaaactattaactggcgaactacttactctagcttcccggcaacaattaatagactggatggaggcggataaagttgcaggaccacttctgcgctcggcccttccggctggctggtttattgctgataaatctggagc

SEQ ID NO: 5575 - DNA, 5232 bp, Artificial Sequence
  Description of Artificial Sequence: Synthetic polynucleotide
cggtgagcgtgggactcgcggtatcattgcagcactggggccagatggtaagccctcccgtatcgtagttatctacacgacggggagtcaggcaactatggatgaacgaaatagacagatcgctgagataggtgcctcactgattaagcattggtaactgtcagaccaagtttactcatatatactttagattgatttacgcgccctgtagcggcgcattaagcgcggcgggtgtggtggttacgcgcagcgtgaccgctacacttgccagcgccctagcgcccgctcctttcgctttcttcccttcctttctcgccacgttcgccggctttccccgtcaagctctaaatcgggggctccctttagggttccgatttagtgctttacggcacctcgaccccaaaaaacttgatttgggtgatggttcacgtagtgggccatcgccctgatagacggtttttcgccctttgacgttggagtccacgttctttaatagtggactcttgttccaaacttgaacaacactcaaccctatctcgggctattcttttgatttataagggattttgccgatttcggcctattggttaaaaaatgagctgatttaacaaaaatttaacgcgaattttaacaaaatattaacgtttacaatttaaaaggatctaggtgaagatcctttttgataatctcatgaccaaaatcccttaacgtgagttttcgttccactgagcgtcagaccccgtagaaaagatcaaaggatcttcttgagatcctttttttctgcgcgtaatctgctgcttgcaaacaaaaaaaccaccgctaccagcggtggtttgtttgccggatcaagagctaccaactctttttccgaaggtaactggcttcagcagagcgcagataccaaatactgtccttctagtgtagccgtagttaggccaccacttcaagaactctgtagcaccgcctacatacctcgctctgctaatcctgttaccagtcaggcatttgagaagcacacggtcacactgcttccggtagtcaataaaccggtaaaccagcaatagacataagcggctatttaacgaccctgccctgaaccgacgaccgggtcgaatttgctttcgaatttctgccattcatccgcttattatcacttattcaggcgtagcaccaggcgtttaagggcaccaataactgccttaaaaaaattacgccccgccctgccactcatcgcagtactgttgtaattcattaagcattctgccgacatggaagccatcacagacggcatgatgaacctgaatcgccagcggcatcagcaccttgtcgccttgcgtataatatttgcccatggtgaaaacgggggcgaagaagttgtccatattggccacgtttaaatcaaaactggtgaaactcacccagggattggctgagacgaaaaacatattctcaataaaccctttagggaaataggccaggttttcaccgtaacacgccacatcttgcgaatatatgtgtagaaactgccggaaatcgtcgtggtattcactccagagcgatgaaaacgtttcagtttgctcatggaaaacggtgtaacaagggtgaacactatcccatatcaccagctcaccgtctttcattgccatacggaattccggatgagcattcatcaggcgggcaagaatgtgaataaaggccggataaaacttgtgcttatttttctttacggtctttaaaaaggccgtaatatccagctgaacggtctggttataggtacattgagcaactgactgaaatgcctcaaaatgttctttacgatgccattgggatatatcaacggtggtatatccagtgatttttttctccattttagcttccttagctcctgaaaatctcgataactcaaaaaatacgcccggtagtgatcttatttcattatggtgaaagttggaacctcttacgtgccgatcaacgtctcattttcgccaaaagttggcccagggcttcccggtatcaacagggacaccaggatttatttattctgcgaagtgatcttccgtcacaggtatttattcggcgcaaagtgcgtcgggtgatgctgccaacttactgatttagtgtatgatggtgtttttgaggtgctccagtggcttctgtttctatcagctgtccctcctgttcagctactgacggggtggtgcgtaacggcaaaagcaccgccggacatcagcgctagcggagtgtatactggcttactatgttggcactgatgagggtgtcagtgaagtgcttcatgtggcaggagaaaaaaggctgcaccggtgcgtcagcagaatatgtgatacaggatatattccgcttcctcgctcactgactcgctacgctcggtcgttcgactgcggcgagcggaaatggcttacgaacggggcggagatttcctggaagatgccaggaagatacttaacagggaagtgagagggccgcggcaaagccgtttttccataggctccgcccccctgacaagcatcacgaaatctgacgctcaaatcagtggtggcgaaacccgacaggactataaagataccaggcgtttccccctggcggctccctcgtgcgctctcctgttcctgcctttcggtttaccggtgtcattccgctgttatggccgcgtttgtctcattccacgcctgacactcagttccgggtaggcagttcgctccaagctggactgtatgcacgaaccccccgttcagtccgaccgctgcgccttatccggtaactatcgtcttgagtccaacccggaaagacatgcaaaagcaccactggcagcagccactggtaattgatttagaggagttagtcttgaagtcatgcgccggttaaggctaaactgaaaggacaagttttggtgactgcgctcctccaagccagttacctcggttcaaagagttggtagctcagagaaccttcgaaaaaccgccctgcaaggcggttttttcgttttcagagcaagagattacgcgcagaccaaaacgatctcaagaagatcatcttattaatcagataaaatatttgctcatgagcccgaagtggcgagcccgatcttccccatcggtgatgtcggcgatataggcgccagcaaccgcacctgtggcgccggtgatgccggccacgatgcgtccggcgtagaggatctgctcatgtttgacagcttatcatcgatgcataatgtgcctgtcaaatggacgaagcagggattctgcaaaccctatgctactccgtcaagccgtcaattgtctgattcgttaccaattatgacaacttgacggctacatcattcactttttcttcacaaccggcacggaactcgctcgggctggccccggtgcattttttaaatacccgcgagaaatagagttgatcgtcaaaaccaacattgcgaccgacggtggcgataggcatccgggtggtgctcaaaagcagcttcgcctggctgatacgttggtcctcgcgccagcttaagacgctaatccctaactgctggcggaaaagatgtgacagacgcgacggcgacaagcaaacatgctgtgcgacgctggcgatatcaaaattgctgtctgccaggtgatcgctgatgtactgacaagcctcgcgtacccgattatccatcggtggatggagcgactcgttaatcgcttccatgcgccgcagtaacaattgctcaagcagatttatcgccagcagctccgaatagcgcccttccccttgcccggcgttaatgatttgcccaaacaggtcgctgaaatgcggctggtgcgcttcatccgggcgaaagaaccccgtattggcaaatattgacggccagttaagccattcatgccagtaggcgcgcggacgaaagtaaacccactggtgataccattcgcgagcctccggatgacgaccgtagtgatgaatctctcctggcgggaacagcaaaatatcacccggtcggcaaacaaattctcgtccctgatttttcaccaccccctgaccgcgaatggtgagattgagaatataacctttcattcccagcggtcggtcgataaaaaaatcgagataaccgttggcctcaatcggcgttaaacccgccaccagatgggcattaaacgagtatcccggcagcaggggatcattttgcgcttcagccatacttttcatactcccgccattcagagaagaaaccaattgtccatattgcatcagacattgccgtcactgcgtcttttactggctcttctcgctaaccaaaccggtaaccccgcttattaaaagcattctgtaacaaagcgggaccaaagccatgacaaaaacgcgtaacaaaagtgtctataatcacggcagaaaagtccacattgattatttgcacggcgtcacactttgctatgccatagcatttttatccataagattagcggatcctacctgacgctttttatcgcaactctctactgtttctccatacccgtttttttgggctagcgaattcgagctcggtacccggggatgtgaactgccgtataggcagccaagaaaaggactggaagaaatcatccaagttggggactgtgaactgccgtataggcagccaagatttgcgagagtagggaactgccaggcatcaaataaaacgaaaggctcagtcgaaagactgggcctttcgttttatctgttgtttgtcggtgaacgctctcctgagtaggacaaatccgccgggagcggatttgaacgttgcgaagcaacggcccggagggtggcgggcaggacgcccgccataaactgccaggcatcaaattaagcagaaggccatcctgacggatggcctttttgcgtttctacaaactcttttgtttatttttctaaatacattcaaatatgtatccgctcatgagacaataaccctgataaatgcttcaataatattgaaaaaggaagagtatgagtattcaacatttccgtgtcgcccttattcccttttttgcggcattttgccttcctgtttttgctcacccagaaacgctggtgaaagtaaaagatgctgaagatcagttggggcaaactattaactggcgaactacttactctagcttcccggcaacaattaatagactggatggaggcggataaagttgcaggaccacttctgcgctcggcccttccggctggctggtttattgctgataaatctggagc

SEQ ID NO: 5576 - DNA, 5232 bp, Artificial Sequence
  Description of Artificial Sequence: Synthetic polynucleotide
cggtgagcgtgggactcgcggtatcattgcagcactggggccagatggtaagccctcccgtatcgtagttatctacacgacggggagtcaggcaactatggatgaacgaaatagacagatcgctgagataggtgcctcactgattaagcattggtaactgtcagaccaagtttactcatatatactttagattgatttacgcgccctgtagcggcgcattaagcgcggcgggtgtggtggttacgcgcagcgtgaccgctacacttgccagcgccctagcgcccgctcctttcgctttcttcccttcctttctcgccacgttcgccggctttccccgtcaagctctaaatcgggggctccctttagggttccgatttagtgctttacggcacctcgaccccaaaaaacttgatttgggtgatggttcacgtagtgggccatcgccctgatagacggtttttcgccctttgacgttggagtccacgttctttaatagtggactcttgttccaaacttgaacaacactcaaccctatctcgggctattcttttgatttataagggattttgccgatttcggcctattggttaaaaaatgagctgatttaacaaaaatttaacgcgaattttaacaaaatattaacgtttacaatttaaaaggatctaggtgaagatcctttttgataatctcatgaccaaaatcccttaacgtgagttttcgttccactgagcgtcagaccccgtagaaaagatcaaaggatcttcttgagatcctttttttctgcgcgtaatctgctgcttgcaaacaaaaaaaccaccgctaccagcggtggtttgtttgccggatcaagagctaccaactctttttccgaaggtaactggcttcagcagagcgcagataccaaatactgtccttctagtgtagccgtagttaggccaccacttcaagaactctgtagcaccgcctacatacctcgctctgctaatcctgttaccagtcaggcatttgagaagcacacggtcacactgcttccggtagtcaataaaccggtaaaccagcaatagacataagcggctatttaacgaccctgccctgaaccgacgaccgggtcgaatttgctttcgaatttctgccattcatccgcttattatcacttattcaggcgtagcaccaggcgtttaagggcaccaataactgccttaaaaaaattacgccccgccctgccactcatcgcagtactgttgtaattcattaagcattctgccgacatggaagccatcacagacggcatgatgaacctgaatcgccagcggcatcagcaccttgtcgccttgcgtataatatttgcccatggtgaaaacgggggcgaagaagttgtccatattggccacgtttaaatcaaaactggtgaaactcacccagggattggctgagacgaaaaacatattctcaataaaccctttagggaaataggccaggttttcaccgtaacacgccacatcttgcgaatatatgtgtagaaactgccggaaatcgtcgtggtattcactccagagcgatgaaaacgtttcagtttgctcatggaaaacggtgtaacaagggtgaacactatcccatatcaccagctcaccgtctttcattgccatacggaattccggatgagcattcatcaggcgggcaagaatgtgaataaaggccggataaaacttgtgcttatttttctttacggtctttaaaaaggccgtaatatccagctgaacggtctggttataggtacattgagcaactgactgaaatgcctcaaaatgttctttacgatgccattgggatatatcaacggtggtatatccagtgatttttttctccattttagcttccttagctcctgaaaatctcgataactcaaaaaatacgcccggtagtgatcttatttcattatggtgaaagttggaacctcttacgtgccgatcaacgtctcattttcgccaaaagttggcccagggcttcccggtatcaacagggacaccaggatttatttattctgcgaagtgatcttccgtcacaggtatttattcggcgcaaagtgcgtcgggtgatgctgccaacttactgatttagtgtatgatggtgtttttgaggtgctccagtggcttctgtttctatcagctgtccctcctgttcagctactgacggggtggtgcgtaacggcaaaagcaccgccggacatcagcgctagcggagtgtatactggcttactatgttggcactgatgagggtgtcagtgaagtgcttcatgtggcaggagaaaaaaggctgcaccggtgcgtcagcagaatatgtgatacaggatatattccgcttcctcgctcactgactcgctacgctcggtcgttcgactgcggcgagcggaaatggcttacgaacggggcggagatttcctggaagatgccaggaagatacttaacagggaagtgagagggccgcggcaaagccgtttttccataggctccgcccccctgacaagcatcacgaaatctgacgctcaaatcagtggtggcgaaacccgacaggactataaagataccaggcgtttccccctggcggctccctcgtgcgctctcctgttcctgcctttcggtttaccggtgtcattccgctgttatggccgcgtttgtctcattccacgcctgacactcagttccgggtaggcagttcgctccaagctggactgtatgcacgaaccccccgttcagtccgaccgctgcgccttatccggtaactatcgtcttgagtccaacccggaaagacatgcaaaagcaccactggcagcagccactggtaattgatttagaggagttagtcttgaagtcatgcgccggttaaggctaaactgaaaggacaagttttggtgactgcgctcctccaagccagttacctcggttcaaagagttggtagctcagagaaccttcgaaaaaccgccctgcaaggcggttttttcgttttcagagcaagagattacgcgcagaccaaaacgatctcaagaagatcatcttattaatcagataaaatatttgctcatgagcccgaagtggcgagcccgatcttccccatcggtgatgtcggcgatataggcgccagcaaccgcacctgtggcgccggtgatgccggccacgatgcgtccggcgtagaggatctgctcatgtttgacagcttatcatcgatgcataatgtgcctgtcaaatggacgaagcagggattctgcaaaccctatgctactccgtcaagccgtcaattgtctgattcgttaccaattatgacaacttgacggctacatcattcactttttcttcacaaccggcacggaactcgctcgggctggccccggtgcattttttaaatacccgcgagaaatagagttgatcgtcaaaaccaacattgcgaccgacggtggcgataggcatccgggtggtgctcaaaagcagcttcgcctggctgatacgttggtcctcgcgccagcttaagacgctaatccctaactgctggcggaaaagatgtgacagacgcgacggcgacaagcaaacatgctgtgcgacgctggcgatatcaaaattgctgtctgccaggtgatcgctgatgtactgacaagcctcgcgtacccgattatccatcggtggatggagcgactcgttaatcgcttccatgcgccgcagtaacaattgctcaagcagatttatcgccagcagctccgaatagcgcccttccccttgcccggcgttaatgatttgcccaaacaggtcgctgaaatgcggctggtgcgcttcatccgggcgaaagaaccccgtattggcaaatattgacggccagttaagccattcatgccagtaggcgcgcggacgaaagtaaacccactggtgataccattcgcgagcctccggatgacgaccgtagtgatgaatctctcctggcgggaacagcaaaatatcacccggtcggcaaacaaattctcgtccctgatttttcaccaccccctgaccgcgaatggtgagattgagaatataacctttcattcccagcggtcggtcgataaaaaaatcgagataaccgttggcctcaatcggcgttaaacccgccaccagatgggcattaaacgagtatcccggcagcaggggatcattttgcgcttcagccatacttttcatactcccgccattcagagaagaaaccaattgtccatattgcatcagacattgccgtcactgcgtcttttactggctcttctcgctaaccaaaccggtaaccccgcttattaaaagcattctgtaacaaagcgggaccaaagccatgacaaaaacgcgtaacaaaagtgtctataatcacggcagaaaagtccacattgattatttgcacggcgtcacactttgctatgccatagcatttttatccataagattagcggatcctacctgacgctttttatcgcaactctctactgtttctccatacccgtttttttgggctagcgaattcgagctcggtacccggggatgtgaactgccgtataggcagccaagaaaaggaccggaaggtagcagccaaggcgggggacgtgaactgccgtataggcagccaagatttgcgagagtagggaactgccaggcatcaaataaaacgaaaggctcagtcgaaagactgggcctttcgttttatctgttgtttgtcggtgaacgctctcctgagtaggacaaatccgccgggagcggatttgaacgttgcgaagcaacggcccggagggtggcgggcaggacgcccgccataaactgccaggcatcaaattaagcagaaggccatcctgacggatggcctttttgcgtttctacaaactcttttgtttatttttctaaatacattcaaatatgtatccgctcatgagacaataaccctgataaatgcttcaataatattgaaaaaggaagagtatgagtattcaacatttccgtgtcgcccttattcccttttttgcggcattttgccttcctgtttttgctcacccagaaacgctggtgaaagtaaaagatgctgaagatcagttggggcaaactattaactggcgaactacttactctagcttcccggcaacaattaatagactggatggaggcggataaagttgcaggaccacttctgcgctcggcccttccggctggctggtttattgctgataaatctggagc

SEQ ID NO: 5577 - DNA, 5232 bp, Artificial Sequence
  Description of Artificial Sequence: Synthetic polynucleotide
cggtgagcgtgggactcgcggtatcattgcagcactggggccagatggtaagccctcccgtatcgtagttatctacacgacggggagtcaggcaactatggatgaacgaaatagacagatcgctgagataggtgcctcactgattaagcattggtaactgtcagaccaagtttactcatatatactttagattgatttacgcgccctgtagcggcgcattaagcgcggcgggtgtggtggttacgcgcagcgtgaccgctacacttgccagcgccctagcgcccgctcctttcgctttcttcccttcctttctcgccacgttcgccggctttccccgtcaagctctaaatcgggggctccctttagggttccgatttagtgctttacggcacctcgaccccaaaaaacttgatttgggtgatggttcacgtagtgggccatcgccctgatagacggtttttcgccctttgacgttggagtccacgttctttaatagtggactcttgttccaaacttgaacaacactcaaccctatctcgggctattcttttgatttataagggattttgccgatttcggcctattggttaaaaaatgagctgatttaacaaaaatttaacgcgaattttaacaaaatattaacgtttacaatttaaaaggatctaggtgaagatcctttttgataatctcatgaccaaaatcccttaacgtgagttttcgttccactgagcgtcagaccccgtagaaaagatcaaaggatcttcttgagatcctttttttctgcgcgtaatctgctgcttgcaaacaaaaaaaccaccgctaccagcggtggtttgtttgccggatcaagagctaccaactctttttccgaaggtaactggcttcagcagagcgcagataccaaatactgtccttctagtgtagccgtagttaggccaccacttcaagaactctgtagcaccgcctacatacctcgctctgctaatcctgttaccagtcaggcatttgagaagcacacggtcacactgcttccggtagtcaataaaccggtaaaccagcaatagacataagcggctatttaacgaccctgccctgaaccgacgaccgggtcgaatttgctttcgaatttctgccattcatccgcttattatcacttattcaggcgtagcaccaggcgtttaagggcaccaataactgccttaaaaaaattacgccccgccctgccactcatcgcagtactgttgtaattcattaagcattctgccgacatggaagccatcacagacggcatgatgaacctgaatcgccagcggcatcagcaccttgtcgccttgcgtataatatttgcccatggtgaaaacgggggcgaagaagttgtccatattggccacgtttaaatcaaaactggtgaaactcacccagggattggctgagacgaaaaacatattctcaataaaccctttagggaaataggccaggttttcaccgtaacacgccacatcttgcgaatatatgtgtagaaactgccggaaatcgtcgtggtattcactccagagcgatgaaaacgtttcagtttgctcatggaaaacggtgtaacaagggtgaacactatcccatatcaccagctcaccgtctttcattgccatacggaattccggatgagcattcatcaggcgggcaagaatgtgaataaaggccggataaaacttgtgcttatttttctttacggtctttaaaaaggccgtaatatccagctgaacggtctggttataggtacattgagcaactgactgaaatgcctcaaaatgttctttacgatgccattgggatatatcaacggtggtatatccagtgatttttttctccattttagcttccttagctcctgaaaatctcgataactcaaaaaatacgcccggtagtgatcttatttcattatggtgaaagttggaacctcttacgtgccgatcaacgtctcattttcgccaaaagttggcccagggcttcccggtatcaacagggacaccaggatttatttattctgcgaagtgatcttccgtcacaggtatttattcggcgcaaagtgcgtcgggtgatgctgccaacttactgatttagtgtatgatggtgtttttgaggtgctccagtggcttctgtttctatcagctgtccctcctgttcagctactgacggggtggtgcgtaacggcaaaagcaccgccggacatcagcgctagcggagtgtatactggcttactatgttggcactgatgagggtgtcagtgaagtgcttcatgtggcaggagaaaaaaggctgcaccggtgcgtcagcagaatatgtgatacaggatatattccgcttcctcgctcactgactcgctacgctcggtcgttcgactgcggcgagcggaaatggcttacgaacggggcggagatttcctggaagatgccaggaagatacttaacagggaagtgagagggccgcggcaaagccgtttttccataggctccgcccccctgacaagcatcacgaaatctgacgctcaaatcagtggtggcgaaacccgacaggactataaagataccaggcgtttccccctggcggctccctcgtgcgctctcctgttcctgcctttcggtttaccggtgtcattccgctgttatggccgcgtttgtctcattccacgcctgacactcagttccgggtaggcagttcgctccaagctggactgtatgcacgaaccccccgttcagtccgaccgctgcgccttatccggtaactatcgtcttgagtccaacccggaaagacatgcaaaagcaccactggcagcagccactggtaattgatttagaggagttagtcttgaagtcatgcgccggttaaggctaaactgaaaggacaagttttggtgactgcgctcctccaagccagttacctcggttcaaagagttggtagctcagagaaccttcgaaaaaccgccctgcaaggcggttttttcgttttcagagcaagagattacgcgcagaccaaaacgatctcaagaagatcatcttattaatcagataaaatatttgctcatgagcccgaagtggcgagcccgatcttccccatcggtgatgtcggcgatataggcgccagcaaccgcacctgtggcgccggtgatgccggccacgatgcgtccggcgtagaggatctgctcatgtttgacagcttatcatcgatgcataatgtgcctgtcaaatggacgaagcagggattctgcaaaccctatgctactccgtcaagccgtcaattgtctgattcgttaccaattatgacaacttgacggctacatcattcactttttcttcacaaccggcacggaactcgctcgggctggccccggtgcattttttaaatacccgcgagaaatagagttgatcgtcaaaaccaacattgcgaccgacggtggcgataggcatccgggtggtgctcaaaagcagcttcgcctggctgatacgttggtcctcgcgccagcttaagacgctaatccctaactgctggcggaaaagatgtgacagacgcgacggcgacaagcaaacatgctgtgcgacgctggcgatatcaaaattgctgtctgccaggtgatcgctgatgtactgacaagcctcgcgtacccgattatccatcggtggatggagcgactcgttaatcgcttccatgcgccgcagtaacaattgctcaagcagatttatcgccagcagctccgaatagcgcccttccccttgcccggcgttaatgatttgcccaaacaggtcgctgaaatgcggctggtgcgcttcatccgggcgaaagaaccccgtattggcaaatattgacggccagttaagccattcatgccagtaggcgcgcggacgaaagtaaacccactggtgataccattcgcgagcctccggatgacgaccgtagtgatgaatctctcctggcgggaacagcaaaatatcacccggtcggcaaacaaattctcgtccctgatttttcaccaccccctgaccgcgaatggtgagattgagaatataacctttcattcccagcggtcggtcgataaaaaaatcgagataaccgttggcctcaatcggcgttaaacccgccaccagatgggcattaaacgagtatcccggcagcaggggatcattttgcgcttcagccatacttttcatactcccgccattcagagaagaaaccaattgtccatattgcatcagacattgccgtcactgcgtcttttactggctcttctcgctaaccaaaccggtaaccccgcttattaaaagcattctgtaacaaagcgggaccaaagccatgacaaaaacgcgtaacaaaagtgtctataatcacggcagaaaagtccacattgattatttgcacggcgtcacactttgctatgccatagcatttttatccataagattagcggatcctacctgacgctttttatcgcaactctctactgtttctccatacccgtttttttgggctagcgaattcgagctcggtacccggggatgtgaactgccgtataggcagccaagaaatacgggtaacagtttctttatggcagggtgaagtgaactgccgtataggcagccaagatttgcgagagtagggaactgccaggcatcaaataaaacgaaaggctcagtcgaaagactgggcctttcgttttatctgttgtttgtcggtgaacgctctcctgagtaggacaaatccgccgggagcggatttgaacgttgcgaagcaacggcccggagggtggcgggcaggacgcccgccataaactgccaggcatcaaattaagcagaaggccatcctgacggatggcctttttgcgtttctacaaactcttttgtttatttttctaaatacattcaaatatgtatccgctcatgagacaataaccctgataaatgcttcaataatattgaaaaaggaagagtatgagtattcaacatttccgtgtcgcccttattcccttttttgcggcattttgccttcctgtttttgctcacccagaaacgctggtgaaagtaaaagatgctgaagatcagttggggcaaactattaactggcgaactacttactctagcttcccggcaacaattaatagactggatggaggcggataaagttgcaggaccacttctgcgctcggcccttccggctggctggtttattgctgataaatctggagc

SEQ ID NO: 5578 - DNA, 5232 bp, Artificial Sequence
  Description of Artificial Sequence: Synthetic polynucleotide
cggtgagcgtgggactcgcggtatcattgcagcactggggccagatggtaagccctcccgtatcgtagttatctacacgacggggagtcaggcaactatggatgaacgaaatagacagatcgctgagataggtgcctcactgattaagcattggtaactgtcagaccaagtttactcatatatactttagattgatttacgcgccctgtagcggcgcattaagcgcggcgggtgtggtggttacgcgcagcgtgaccgctacacttgccagcgccctagcgcccgctcctttcgctttcttcccttcctttctcgccacgttcgccggctttccccgtcaagctctaaatcgggggctccctttagggttccgatttagtgctttacggcacctcgaccccaaaaaacttgatttgggtgatggttcacgtagtgggccatcgccctgatagacggtttttcgccctttgacgttggagtccacgttctttaatagtggactcttgttccaaacttgaacaacactcaaccctatctcgggctattcttttgatttataagggattttgccgatttcggcctattggttaaaaaatgagctgatttaacaaaaatttaacgcgaattttaacaaaatattaacgtttacaatttaaaaggatctaggtgaagatcctttttgataatctcatgaccaaaatcccttaacgtgagttttcgttccactgagcgtcagaccccgtagaaaagatcaaaggatcttcttgagatcctttttttctgcgcgtaatctgctgcttgcaaacaaaaaaaccaccgctaccagcggtggtttgtttgccggatcaagagctaccaactctttttccgaaggtaactggcttcagcagagcgcagataccaaatactgtccttctagtgtagccgtagttaggccaccacttcaagaactctgtagcaccgcctacatacctcgctctgctaatcctgttaccagtcaggcatttgagaagcacacggtcacactgcttccggtagtcaataaaccggtaaaccagcaatagacataagcggctatttaacgaccctgccctgaaccgacgaccgggtcgaatttgctttcgaatttctgccattcatccgcttattatcacttattcaggcgtagcaccaggcgtttaagggcaccaataactgccttaaaaaaattacgccccgccctgccactcatcgcagtactgttgtaattcattaagcattctgccgacatggaagccatcacagacggcatgatgaacctgaatcgccagcggcatcagcaccttgtcgccttgcgtataatatttgcccatggtgaaaacgggggcgaagaagttgtccatattggccacgtttaaatcaaaactggtgaaactcacccagggattggctgagacgaaaaacatattctcaataaaccctttagggaaataggccaggttttcaccgtaacacgccacatcttgcgaatatatgtgtagaaactgccggaaatcgtcgtggtattcactccagagcgatgaaaacgtttcagtttgctcatggaaaacggtgtaacaagggtgaacactatcccatatcaccagctcaccgtctttcattgccatacggaattccggatgagcattcatcaggcgggcaagaatgtgaataaaggccggataaaacttgtgcttatttttctttacggtctttaaaaaggccgtaatatccagctgaacggtctggttataggtacattgagcaactgactgaaatgcctcaaaatgttctttacgatgccattgggatatatcaacggtggtatatccagtgatttttttctccattttagcttccttagctcctgaaaatctcgataactcaaaaaatacgcccggtagtgatcttatttcattatggtgaaagttggaacctcttacgtgccgatcaacgtctcattttcgccaaaagttggcccagggcttcccggtatcaacagggacaccaggatttatttattctgcgaagtgatcttccgtcacaggtatttattcggcgcaaagtgcgtcgggtgatgctgccaacttactgatttagtgtatgatggtgtttttgaggtgctccagtggcttctgtttctatcagctgtccctcctgttcagctactgacggggtggtgcgtaacggcaaaagcaccgccggacatcagcgctagcggagtgtatactggcttactatgttggcactgatgagggtgtcagtgaagtgcttcatgtggcaggagaaaaaaggctgcaccggtgcgtcagcagaatatgtgatacaggatatattccgcttcctcgctcactgactcgctacgctcggtcgttcgactgcggcgagcggaaatggcttacgaacggggcggagatttcctggaagatgccaggaagatacttaacagggaagtgagagggccgcggcaaagccgtttttccataggctccgcccccctgacaagcatcacgaaatctgacgctcaaatcagtggtggcgaaacccgacaggactataaagataccaggcgtttccccctggcggctccctcgtgcgctctcctgttcctgcctttcggtttaccggtgtcattccgctgttatggccgcgtttgtctcattccacgcctgacactcagttccgggtaggcagttcgctccaagctggactgtatgcacgaaccccccgttcagtccgaccgctgcgccttatccggtaactatcgtcttgagtccaacccggaaagacatgcaaaagcaccactggcagcagccactggtaattgatttagaggagttagtcttgaagtcatgcgccggttaaggctaaactgaaaggacaagttttggtgactgcgctcctccaagccagttacctcggttcaaagagttggtagctcagagaaccttcgaaaaaccgccctgcaaggcggttttttcgttttcagagcaagagattacgcgcagaccaaaacgatctcaagaagatcatcttattaatcagataaaatatttgctcatgagcccgaagtggcgagcccgatcttccccatcggtgatgtcggcgatataggcgccagcaaccgcacctgtggcgccggtgatgccggccacgatgcgtccggcgtagaggatctgctcatgtttgacagcttatcatcgatgcataatgtgcctgtcaaatggacgaagcagggattctgcaaaccctatgctactccgtcaagccgtcaattgtctgattcgttaccaattatgacaacttgacggctacatcattcactttttcttcacaaccggcacggaactcgctcgggctggccccggtgcattttttaaatacccgcgagaaatagagttgatcgtcaaaaccaacattgcgaccgacggtggcgataggcatccgggtggtgctcaaaagcagcttcgcctggctgatacgttggtcctcgcgccagcttaagacgctaatccctaactgctggcggaaaagatgtgacagacgcgacggcgacaagcaaacatgctgtgcgacgctggcgatatcaaaattgctgtctgccaggtgatcgctgatgtactgacaagcctcgcgtacccgattatccatcggtggatggagcgactcgttaatcgcttccatgcgccgcagtaacaattgctcaagcagatttatcgccagcagctccgaatagcgcccttccccttgcccggcgttaatgatttgcccaaacaggtcgctgaaatgcggctggtgcgcttcatccgggcgaaagaaccccgtattggcaaatattgacggccagttaagccattcatgccagtaggcgcgcggacgaaagtaaacccactggtgataccattcgcgagcctccggatgacgaccgtagtgatgaatctctcctggcgggaacagcaaaatatcacccggtcggcaaacaaattctcgtccctgatttttcaccaccccctgaccgcgaatggtgagattgagaatataacctttcattcccagcggtcggtcgataaaaaaatcgagataaccgttggcctcaatcggcgttaaacccgccaccagatgggcattaaacgagtatcccggcagcaggggatcattttgcgcttcagccatacttttcatactcccgccattcagagaagaaaccaattgtccatattgcatcagacattgccgtcactgcgtcttttactggctcttctcgctaaccaaaccggtaaccccgcttattaaaagcattctgtaacaaagcgggaccaaagccatgacaaaaacgcgtaacaaaagtgtctataatcacggcagaaaagtccacattgattatttgcacggcgtcacactttgctatgccatagcatttttatccataagattagcggatcctacctgacgctttttatcgcaactctctactgtttctccatacccgtttttttgggctagcgaattcgagctcggtacccggggatgtgaactgccgtataggcagccaagaaaacagcggatggttcggataatgcgaacagcgcgtgaactgccgtataggcagccaagatttgcgagagtagggaactgccaggcatcaaataaaacgaaaggctcagtcgaaagactgggcctttcgttttatctgttgtttgtcggtgaacgctctcctgagtaggacaaatccgccgggagcggatttgaacgttgcgaagcaacggcccggagggtggcgggcaggacgcccgccataaactgccaggcatcaaattaagcagaaggccatcctgacggatggcctttttgcgtttctacaaactcttttgtttatttttctaaatacattcaaatatgtatccgctcatgagacaataaccctgataaatgcttcaataatattgaaaaaggaagagtatgagtattcaacatttccgtgtcgcccttattcccttttttgcggcattttgccttcctgtttttgctcacccagaaacgctggtgaaagtaaaagatgctgaagatcagttggggcaaactattaactggcgaactacttactctagcttcccggcaacaattaatagactggatggaggcggataaagttgcaggaccacttctgcgctcggcccttccggctggctggtttattgctgataaatctggagc

SEQ ID NO: 5579 - DNA, 5948 bp, Artificial Sequence
  Description of Artificial Sequence: Synthetic polynucleotide
cggtgagcgtgggactcgcggtatcattgcagcactggggccagatggtaagccctcccgtatcgtagttatctacacgacggggagtcaggcaactatggatgaacgaaatagacagatcgctgagataggtgcctcactgattaagcattggtaactgtcagaccaagtttactcatatatactttagattgatttacgcgccctgtagcggcgcattaagcgcggcgggtgtggtggttacgcgcagcgtgaccgctacacttgccagcgccctagcgcccgctcctttcgctttcttcccttcctttctcgccacgttcgccggctttccccgtcaagctctaaatcgggggctccctttagggttccgatttagtgctttacggcacctcgaccccaaaaaacttgatttgggtgatggttcacgtagtgggccatcgccctgatagacggtttttcgccctttgacgttggagtccacgttctttaatagtggactcttgttccaaacttgaacaacactcaaccctatctcgggctattcttttgatttataagggattttgccgatttcggcctattggttaaaaaatgagctgatttaacaaaaatttaacgcgaattttaacaaaatattaacgtttacaatttaaaaggatctaggtgaagatcctttttgataatctcatgaccaaaatcccttaacgtgagttttcgttccactgagcgtcagaccccgtagaaaagatcaaaggatcttcttgagatcctttttttctgcgcgtaatctgctgcttgcaaacaaaaaaaccaccgctaccagcggtggtttgtttgccggatcaagagctaccaactctttttccgaaggtaactggcttcagcagagcgcagataccaaatactgtccttctagtgtagccgtagttaggccaccacttcaagaactctgtagcaccgcctacatacctcgctctgctaatcctgttaccagtcaggcatttgagaagcacacggtcacactgcttccggtagtcaataaaccggtaaaccagcaatagacataagcggctatttaacgaccctgccctgaaccgacgaccgggtcgaatttgctttcgaatttctgccattcatccgcttattatcacttattcaggcgtagcaccaggcgtttaagggcaccaataactgccttaaaaaaattacgccccgccctgccactcatcgcagtactgttgtaattcattaagcattctgccgacatggaagccatcacagacggcatgatgaacctgaatcgccagcggcatcagcaccttgtcgccttgcgtataatatttgcccatggtgaaaacgggggcgaagaagttgtccatattggccacgtttaaatcaaaactggtgaaactcacccagggattggctgagacgaaaaacatattctcaataaaccctttagggaaataggccaggttttcaccgtaacacgccacatcttgcgaatatatgtgtagaaactgccggaaatcgtcgtggtattcactccagagcgatgaaaacgtttcagtttgctcatggaaaacggtgtaacaagggtgaacactatcccatatcaccagctcaccgtctttcattgccatacggaattccggatgagcattcatcaggcgggcaagaatgtgaataaaggccggataaaacttgtgcttatttttctttacggtctttaaaaaggccgtaatatccagctgaacggtctggttataggtacattgagcaactgactgaaatgcctcaaaatgttctttacgatgccattgggatatatcaacggtggtatatccagtgatttttttctccattttagcttccttagctcctgaaaatctcgataactcaaaaaatacgcccggtagtgatcttatttcattatggtgaaagttggaacctcttacgtgccgatcaacgtctcattttcgccaaaagttggcccagggcttcccggtatcaacagggacaccaggatttatttattctgcgaagtgatcttccgtcacaggtatttattcggcgcaaagtgcgtcgggtgatgctgccaacttactgatttagtgtatgatggtgtttttgaggtgctccagtggcttctgtttctatcagctgtccctcctgttcagctactgacggggtggtgcgtaacggcaaaagcaccgccggacatcagcgctagcggagtgtatactggcttactatgttggcactgatgagggtgtcagtgaagtgcttcatgtggcaggagaaaaaaggctgcaccggtgcgtcagcagaatatgtgatacaggatatattccgcttcctcgctcactgactcgctacgctcggtcgttcgactgcggcgagcggaaatggcttacgaacggggcggagatttcctggaagatgccaggaagatacttaacagggaagtgagagggccgcggcaaagccgtttttccataggctccgcccccctgacaagcatcacgaaatctgacgctcaaatcagtggtggcgaaacccgacaggactataaagataccaggcgtttccccctggcggctccctcgtgcgctctcctgttcctgcctttcggtttaccggtgtcattccgctgttatggccgcgtttgtctcattccacgcctgacactcagttccgggtaggcagttcgctccaagctggactgtatgcacgaaccccccgttcagtccgaccgctgcgccttatccggtaactatcgtcttgagtccaacccggaaagacatgcaaaagcaccactggcagcagccactggtaattgatttagaggagttagtcttgaagtcatgcgccggttaaggctaaactgaaaggacaagttttggtgactgcgctcctccaagccagttacctcggttcaaagagttggtagctcagagaaccttcgaaaaaccgccctgcaaggcggttttttcgttttcagagcaagagattacgcgcagaccaaaacgatctcaagaagatcatcttattaatcagataaaatatttgctcatgagcccgaagtggcgagcccgatcttccccatcggtgatgtcggcgatataggcgccagcaaccgcacctgtggcgccggtgatgccggccacgatgcgtccggcgtagaggatctgctcatgtttgacagcttatcatcgatgcataatgtgcctgtcaaatggacgaagcagggattctgcaaaccctatgctactccgtcaagccgtcaattgtctgattcgttaccaattatgacaacttgacggctacatcattcactttttcttcacaaccggcacggaactcgctcgggctggccccggtgcattttttaaatacccgcgagaaatagagttgatcgtcaaaaccaacattgcgaccgacggtggcgataggcatccgggtggtgctcaaaagcagcttcgcctggctgatacgttggtcctcgcgccagcttaagacgctaatccctaactgctggcggaaaagatgtgacagacgcgacggcgacaagcaaacatgctgtgcgacgctggcgatatcaaaattgctgtctgccaggtgatcgctgatgtactgacaagcctcgcgtacccgattatccatcggtggatggagcgactcgttaatcgcttccatgcgccgcagtaacaattgctcaagcagatttatcgccagcagctccgaatagcgcccttccccttgcccggcgttaatgatttgcccaaacaggtcgctgaaatgcggctggtgcgcttcatccgggcgaaagaaccccgtattggcaaatattgacggccagttaagccattcatgccagtaggcgcgcggacgaaagtaaacccactggtgataccattcgcgagcctccggatgacgaccgtagtgatgaatctctcctggcgggaacagcaaaatatcacccggtcggcaaacaaattctcgtccctgatttttcaccaccccctgaccgcgaatggtgagattgagaatataacctttcattcccagcggtcggtcgataaaaaaatcgagataaccgttggcctcaatcggcgttaaacccgccaccagatgggcattaaacgagtatcccggcagcaggggatcattttgcgcttcagccatacttttcatactcccgccattcagagaagaaaccaattgtccatattgcatcagacattgccgtcactgcgtcttttactggctcttctcgctaaccaaaccggtaaccccgcttattaaaagcattctgtaacaaagcgggaccaaagccatgacaaaaacgcgtaacaaaagtgtctataatcacggcagaaaagtccacattgattatttgcacggcgtcacactttgctatgccatagcatttttatccataagattagcggatcctacctgacgctttttatcgcaactctctactgtttctccatacccgtttttttgggctagcgaattcgagctcggtacccggggatgtgaactgccgtataggcagccaagatttgagacccacgatttgtaataacagagtgtcttgtatttttaaagaaagtctatttaatacaagtgattatattaattaacggtaagcatcagcgggtgacaaaacgagcatgcttactaataaaatgttaacctctgaggaagaattgtgaaactatcactaatggtagctatatcgaagaatggagttatcgggaatggccctgatattccatggagtgccaaaggtgaacagctcctgtttaaagctattacctataaccaatggctgttggttggacgcaagacttttgaatcaatgggagcattacccaaccgaaagtatgcggtcgtaacacgttcaagttttacatctgacaatgagaacgtattgatctttccatcaattaaagatgctttaaccaacctaaagaaaataacggatcatgtcattgtttcaggtggtggggagatatacaaaagcctgatcgatcaagtagatacactacatatatctacaatagacatcgagccggaaggtgatgtttactttcctgaaatccccagcaattttaggccagtttttacccaagacttcgcctctaacataaattatagttaccaaatctggcaaaagggttaacaagtggcagcaacggattcgcaaacctgtcacgccttttgtgccaaaagccgcgccaggtttgcgatccgctgtgccaggcgttaggcgtcatatgaagatttcggtgatccctgagcaggtctcattttctgccgtaaaggcagatattatttgcgagagtagggaactgccaggcatcaaataaaacgaaaggctcagtcgaaagactgggcctttcgttttatctgttgtttgtcggtgaacgctctcctgagtaggacaaatccgccgggagcggatttgaacgttgcgaagcaacggcccggagggtggcgggcaggacgcccgccataaactgccaggcatcaaattaagcagaaggccatcctgacggatggcctttttgcgtttctacaaactcttttgtttatttttctaaatacattcaaatatgtatccgctcatgagacaataaccctgataaatgcttcaataatattgaaaaaggaagagtatgagtattcaacatttccgtgtcgcccttattcccttttttgcggcattttgccttcctgtttttgctcacccagaaacgctggtgaaagtaaaagatgctgaagatcagttggggcaaactattaactggcgaactacttactctagcttcccggcaacaattaatagactggatggaggcggataaagttgcaggaccacttctgcgctcggcccttccggctggctggtttattgctgataaatctggagc

SEQ ID NO: 5580 - DNA, 5232 bp, Artificial Sequence
  Description of Artificial Sequence: Synthetic polynucleotide
cggtgagcgtgggactcgcggtatcattgcagcactggggccagatggtaagccctcccgtatcgtagttatctacacgacggggagtcaggcaactatggatgaacgaaatagacagatcgctgagataggtgcctcactgattaagcattggtaactgtcagaccaagtttactcatatatactttagattgatttacgcgccctgtagcggcgcattaagcgcggcgggtgtggtggttacgcgcagcgtgaccgctacacttgccagcgccctagcgcccgctcctttcgctttcttcccttcctttctcgccacgttcgccggctttccccgtcaagctctaaatcgggggctccctttagggttccgatttagtgctttacggcacctcgaccccaaaaaacttgatttgggtgatggttcacgtagtgggccatcgccctgatagacggtttttcgccctttgacgttggagtccacgttctttaatagtggactcttgttccaaacttgaacaacactcaaccctatctcgggctattcttttgatttataagggattttgccgatttcggcctattggttaaaaaatgagctgatttaacaaaaatttaacgcgaattttaacaaaatattaacgtttacaatttaaaaggatctaggtgaagatcctttttgataatctcatgaccaaaatcccttaacgtgagttttcgttccactgagcgtcagaccccgtagaaaagatcaaaggatcttcttgagatcctttttttctgcgcgtaatctgctgcttgcaaacaaaaaaaccaccgctaccagcggtggtttgtttgccggatcaagagctaccaactctttttccgaaggtaactggcttcagcagagcgcagataccaaatactgtccttctagtgtagccgtagttaggccaccacttcaagaactctgtagcaccgcctacatacctcgctctgctaatcctgttaccagtcaggcatttgagaagcacacggtcacactgcttccggtagtcaataaaccggtaaaccagcaatagacataagcggctatttaacgaccctgccctgaaccgacgaccgggtcgaatttgctttcgaatttctgccattcatccgcttattatcacttattcaggcgtagcaccaggcgtttaagggcaccaataactgccttaaaaaaattacgccccgccctgccactcatcgcagtactgttgtaattcattaagcattctgccgacatggaagccatcacagacggcatgatgaacctgaatcgccagcggcatcagcaccttgtcgccttgcgtataatatttgcccatggtgaaaacgggggcgaagaagttgtccatattggccacgtttaaatcaaaactggtgaaactcacccagggattggctgagacgaaaaacatattctcaataaaccctttagggaaataggccaggttttcaccgtaacacgccacatcttgcgaatatatgtgtagaaactgccggaaatcgtcgtggtattcactccagagcgatgaaaacgtttcagtttgctcatggaaaacggtgtaacaagggtgaacactatcccatatcaccagctcaccgtctttcattgccatacggaattccggatgagcattcatcaggcgggcaagaatgtgaataaaggccggataaaacttgtgcttatttttctttacggtctttaaaaaggccgtaatatccagctgaacggtctggttataggtacattgagcaactgactgaaatgcctcaaaatgttctttacgatgccattgggatatatcaacggtggtatatccagtgatttttttctccattttagcttccttagctcctgaaaatctcgataactcaaaaaatacgcccggtagtgatcttatttcattatggtgaaagttggaacctcttacgtgccgatcaacgtctcattttcgccaaaagttggcccagggcttcccggtatcaacagggacaccaggatttatttattctgcgaagtgatcttccgtcacaggtatttattcggcgcaaagtgcgtcgggtgatgctgccaacttactgatttagtgtatgatggtgtttttgaggtgctccagtggcttctgtttctatcagctgtccctcctgttcagctactgacggggtggtgcgtaacggcaaaagcaccgccggacatcagcgctagcggagtgtatactggcttactatgttggcactgatgagggtgtcagtgaagtgcttcatgtggcaggagaaaaaaggctgcaccggtgcgtcagcagaatatgtgatacaggatatattccgcttcctcgctcactgactcgctacgctcggtcgttcgactgcggcgagcggaaatggcttacgaacggggcggagatttcctggaagatgccaggaagatacttaacagggaagtgagagggccgcggcaaagccgtttttccataggctccgcccccctgacaagcatcacgaaatctgacgctcaaatcagtggtggcgaaacccgacaggactataaagataccaggcgtttccccctggcggctccctcgtgcgctctcctgttcctgcctttcggtttaccggtgtcattccgctgttatggccgcgtttgtctcattccacgcctgacactcagttccgggtaggcagttcgctccaagctggactgtatgcacgaaccccccgttcagtccgaccgctgcgccttatccggtaactatcgtcttgagtccaacccggaaagacatgcaaaagcaccactggcagcagccactggtaattgatttagaggagttagtcttgaagtcatgcgccggttaaggctaaactgaaaggacaagttttggtgactgcgctcctccaagccagttacctcggttcaaagagttggtagctcagagaaccttcgaaaaaccgccctgcaaggcggttttttcgttttcagagcaagagattacgcgcagaccaaaacgatctcaagaagatcatcttattaatcagataaaatatttgctcatgagcccgaagtggcgagcccgatcttccccatcggtgatgtcggcgatataggcgccagcaaccgcacctgtggcgccggtgatgccggccacgatgcgtccggcgtagaggatctgctcatgtttgacagcttatcatcgatgcataatgtgcctgtcaaatggacgaagcagggattctgcaaaccctatgctactccgtcaagccgtcaattgtctgattcgttaccaattatgacaacttgacggctacatcattcactttttcttcacaaccggcacggaactcgctcgggctggccccggtgcattttttaaatacccgcgagaaatagagttgatcgtcaaaaccaacattgcgaccgacggtggcgataggcatccgggtggtgctcaaaagcagcttcgcctggctgatacgttggtcctcgcgccagcttaagacgctaatccctaactgctggcggaaaagatgtgacagacgcgacggcgacaagcaaacatgctgtgcgacgctggcgatatcaaaattgctgtctgccaggtgatcgctgatgtactgacaagcctcgcgtacccgattatccatcggtggatggagcgactcgttaatcgcttccatgcgccgcagtaacaattgctcaagcagatttatcgccagcagctccgaatagcgcccttccccttgcccggcgttaatgatttgcccaaacaggtcgctgaaatgcggctggtgcgcttcatccgggcgaaagaaccccgtattggcaaatattgacggccagttaagccattcatgccagtaggcgcgcggacgaaagtaaacccactggtgataccattcgcgagcctccggatgacgaccgtagtgatgaatctctcctggcgggaacagcaaaatatcacccggtcggcaaacaaattctcgtccctgatttttcaccaccccctgaccgcgaatggtgagattgagaatataacctttcattcccagcggtcggtcgataaaaaaatcgagataaccgttggcctcaatcggcgttaaacccgccaccagatgggcattaaacgagtatcccggcagcaggggatcattttgcgcttcagccatacttttcatactcccgccattcagagaagaaaccaattgtccatattgcatcagacattgccgtcactgcgtcttttactggctcttctcgctaaccaaaccggtaaccccgcttattaaaagcattctgtaacaaagcgggaccaaagccatgacaaaaacgcgtaacaaaagtgtctataatcacggcagaaaagtccacattgattatttgcacggcgtcacactttgctatgccatagcatttttatccataagattagcggatcctacctgacgctttttatcgcaactctctactgtttctccatacccgtttttttgggctagcgaattcgagctcggtacccggggatgtgaactgccgtataggcagccaagattcggaaggggagggcaccctgcttattgataatattttctgccgtaaaggcagatattatttgcgagagtagggaactgccaggcatcaaataaaacgaaaggctcagtcgaaagactgggcctttcgttttatctgttgtttgtcggtgaacgctctcctgagtaggacaaatccgccgggagcggatttgaacgttgcgaagcaacggcccggagggtggcgggcaggacgcccgccataaactgccaggcatcaaattaagcagaaggccatcctgacggatggcctttttgcgtttctacaaactcttttgtttatttttctaaatacattcaaatatgtatccgctcatgagacaataaccctgataaatgcttcaataatattgaaaaaggaagagtatgagtattcaacatttccgtgtcgcccttattcccttttttgcggcattttgccttcctgtttttgctcacccagaaacgctggtgaaagtaaaagatgctgaagatcagttggggcaaactattaactggcgaactacttactctagcttcccggcaacaattaatagactggatggaggcggataaagttgcaggaccacttctgcgctcggcccttccggctggctggtttattgctgataaatctggagc

SEQ ID NO: 5581 - DNA, 5232 bp, Artificial Sequence
  Description of Artificial Sequence: Synthetic polynucleotide
cggtgagcgtgggactcgcggtatcattgcagcactggggccagatggtaagccctcccgtatcgtagttatctacacgacggggagtcaggcaactatggatgaacgaaatagacagatcgctgagataggtgcctcactgattaagcattggtaactgtcagaccaagtttactcatatatactttagattgatttacgcgccctgtagcggcgcattaagcgcggcgggtgtggtggttacgcgcagcgtgaccgctacacttgccagcgccctagcgcccgctcctttcgctttcttcccttcctttctcgccacgttcgccggctttccccgtcaagctctaaatcgggggctccctttagggttccgatttagtgctttacggcacctcgaccccaaaaaacttgatttgggtgatggttcacgtagtgggccatcgccctgatagacggtttttcgccctttgacgttggagtccacgttctttaatagtggactcttgttccaaacttgaacaacactcaaccctatctcgggctattcttttgatttataagggattttgccgatttcggcctattggttaaaaaatgagctgatttaacaaaaatttaacgcgaattttaacaaaatattaacgtttacaatttaaaaggatctaggtgaagatcctttttgataatctcatgaccaaaatcccttaacgtgagttttcgttccactgagcgtcagaccccgtagaaaagatcaaaggatcttcttgagatcctttttttctgcgcgtaatctgctgcttgcaaacaaaaaaaccaccgctaccagcggtggtttgtttgccggatcaagagctaccaactctttttccgaaggtaactggcttcagcagagcgcagataccaaatactgtccttctagtgtagccgtagttaggccaccacttcaagaactctgtagcaccgcctacatacctcgctctgctaatcctgttaccagtcaggcatttgagaagcacacggtcacactgcttccggtagtcaataaaccggtaaaccagcaatagacataagcggctatttaacgaccctgccctgaaccgacgaccgggtcgaatttgctttcgaatttctgccattcatccgcttattatcacttattcaggcgtagcaccaggcgtttaagggcaccaataactgccttaaaaaaattacgccccgccctgccactcatcgcagtactgttgtaattcattaagcattctgccgacatggaagccatcacagacggcatgatgaacctgaatcgccagcggcatcagcaccttgtcgccttgcgtataatatttgcccatggtgaaaacgggggcgaagaagttgtccatattggccacgtttaaatcaaaactggtgaaactcacccagggattggctgagacgaaaaacatattctcaataaaccctttagggaaataggccaggttttcaccgtaacacgccacatcttgcgaatatatgtgtagaaactgccggaaatcgtcgtggtattcactccagagcgatgaaaacgtttcagtttgctcatggaaaacggtgtaacaagggtgaacactatcccatatcaccagctcaccgtctttcattgccatacggaattccggatgagcattcatcaggcgggcaagaatgtgaataaaggccggataaaacttgtgcttatttttctttacggtctttaaaaaggccgtaatatccagctgaacggtctggttataggtacattgagcaactgactgaaatgcctcaaaatgttctttacgatgccattgggatatatcaacggtggtatatccagtgatttttttctccattttagcttccttagctcctgaaaatctcgataactcaaaaaatacgcccggtagtgatcttatttcattatggtgaaagttggaacctcttacgtgccgatcaacgtctcattttcgccaaaagttggcccagggcttcccggtatcaacagggacaccaggatttatttattctgcgaagtgatcttccgtcacaggtatttattcggcgcaaagtgcgtcgggtgatgctgccaacttactgatttagtgtatgatggtgtttttgaggtgctccagtggcttctgtttctatcagctgtccctcctgttcagctactgacggggtggtgcgtaacggcaaaagcaccgccggacatcagcgctagcggagtgtatactggcttactatgttggcactgatgagggtgtcagtgaagtgcttcatgtggcaggagaaaaaaggctgcaccggtgcgtcagcagaatatgtgatacaggatatattccgcttcctcgctcactgactcgctacgctcggtcgttcgactgcggcgagcggaaatggcttacgaacggggcggagatttcctggaagatgccaggaagatacttaacagggaagtgagagggccgcggcaaagccgtttttccataggctccgcccccctgacaagcatcacgaaatctgacgctcaaatcagtggtggcgaaacccgacaggactataaagataccaggcgtttccccctggcggctccctcgtgcgctctcctgttcctgcctttcggtttaccggtgtcattccgctgttatggccgcgtttgtctcattccacgcctgacactcagttccgggtaggcagttcgctccaagctggactgtatgcacgaaccccccgttcagtccgaccgctgcgccttatccggtaactatcgtcttgagtccaacccggaaagacatgcaaaagcaccactggcagcagccactggtaattgatttagaggagttagtcttgaagtcatgcgccggttaaggctaaactgaaaggacaagttttggtgactgcgctcctccaagccagttacctcggttcaaagagttggtagctcagagaaccttcgaaaaaccgccctgcaaggcggttttttcgttttcagagcaagagattacgcgcagaccaaaacgatctcaagaagatcatcttattaatcagataaaatatttgctcatgagcccgaagtggcgagcccgatcttccccatcggtgatgtcggcgatataggcgccagcaaccgcacctgtggcgccggtgatgccggccacgatgcgtccggcgtagaggatctgctcatgtttgacagcttatcatcgatgcataatgtgcctgtcaaatggacgaagcagggattctgcaaaccctatgctactccgtcaagccgtcaattgtctgattcgttaccaattatgacaacttgacggctacatcattcactttttcttcacaaccggcacggaactcgctcgggctggccccggtgcattttttaaatacccgcgagaaatagagttgatcgtcaaaaccaacattgcgaccgacggtggcgataggcatccgggtggtgctcaaaagcagcttcgcctggctgatacgttggtcctcgcgccagcttaagacgctaatccctaactgctggcggaaaagatgtgacagacgcgacggcgacaagcaaacatgctgtgcgacgctggcgatatcaaaattgctgtctgccaggtgatcgctgatgtactgacaagcctcgcgtacccgattatccatcggtggatggagcgactcgttaatcgcttccatgcgccgcagtaacaattgctcaagcagatttatcgccagcagctccgaatagcgcccttccccttgcccggcgttaatgatttgcccaaacaggtcgctgaaatgcggctggtgcgcttcatccgggcgaaagaaccccgtattggcaaatattgacggccagttaagccattcatgccagtaggcgcgcggacgaaagtaaacccactggtgataccattcgcgagcctccggatgacgaccgtagtgatgaatctctcctggcgggaacagcaaaatatcacccggtcggcaaacaaattctcgtccctgatttttcaccaccccctgaccgcgaatggtgagattgagaatataacctttcattcccagcggtcggtcgataaaaaaatcgagataaccgttggcctcaatcggcgttaaacccgccaccagatgggcattaaacgagtatcccggcagcaggggatcattttgcgcttcagccatacttttcatactcccgccattcagagaagaaaccaattgtccatattgcatcagacattgccgtcactgcgtcttttactggctcttctcgctaaccaaaccggtaaccccgcttattaaaagcattctgtaacaaagcgggaccaaagccatgacaaaaacgcgtaacaaaagtgtctataatcacggcagaaaagtccacattgattatttgcacggcgtcacactttgctatgccatagcatttttatccataagattagcggatcctacctgacgctttttatcgcaactctctactgtttctccatacccgtttttttgggctagcgaattcgagctcggtacccggggatgtgaactgccgtataggcagccaagattaggactggaagaaatcatccaagttggggactattttctgccgtaaaggcagatattatttgcgagagtagggaactgccaggcatcaaataaaacgaaaggctcagtcgaaagactgggcctttcgttttatctgttgtttgtcggtgaacgctctcctgagtaggacaaatccgccgggagcggatttgaacgttgcgaagcaacggcccggagggtggcgggcaggacgcccgccataaactgccaggcatcaaattaagcagaaggccatcctgacggatggcctttttgcgtttctacaaactcttttgtttatttttctaaatacattcaaatatgtatccgctcatgagacaataaccctgataaatgcttcaataatattgaaaaaggaagagtatgagtattcaacatttccgtgtcgcccttattcccttttttgcggcattttgccttcctgtttttgctcacccagaaacgctggtgaaagtaaaagatgctgaagatcagttggggcaaactattaactggcgaactacttactctagcttcccggcaacaattaatagactggatggaggcggataaagttgcaggaccacttctgcgctcggcccttccggctggctggtttattgctgataaatctggagc

SEQ ID NO: 5582 - DNA, 5232 bp, Artificial Sequence
  Description of Artificial Sequence: Synthetic polynucleotide
cggtgagcgtgggactcgcggtatcattgcagcactggggccagatggtaagccctcccgtatcgtagttatctacacgacggggagtcaggcaactatggatgaacgaaatagacagatcgctgagataggtgcctcactgattaagcattggtaactgtcagaccaagtttactcatatatactttagattgatttacgcgccctgtagcggcgcattaagcgcggcgggtgtggtggttacgcgcagcgtgaccgctacacttgccagcgccctagcgcccgctcctttcgctttcttcccttcctttctcgccacgttcgccggctttccccgtcaagctctaaatcgggggctccctttagggttccgatttagtgctttacggcacctcgaccccaaaaaacttgatttgggtgatggttcacgtagtgggccatcgccctgatagacggtttttcgccctttgacgttggagtccacgttctttaatagtggactcttgttccaaacttgaacaacactcaaccctatctcgggctattcttttgatttataagggattttgccgatttcggcctattggttaaaaaatgagctgatttaacaaaaatttaacgcgaattttaacaaaatattaacgtttacaatttaaaaggatctaggtgaagatcctttttgataatctcatgaccaaaatcccttaacgtgagttttcgttccactgagcgtcagaccccgtagaaaagatcaaaggatcttcttgagatcctttttttctgcgcgtaatctgctgcttgcaaacaaaaaaaccaccgctaccagcggtggtttgtttgccggatcaagagctaccaactctttttccgaaggtaactggcttcagcagagcgcagataccaaatactgtccttctagtgtagccgtagttaggccaccacttcaagaactctgtagcaccgcctacatacctcgctctgctaatcctgttaccagtcaggcatttgagaagcacacggtcacactgcttccggtagtcaataaaccggtaaaccagcaatagacataagcggctatttaacgaccctgccctgaaccgacgaccgggtcgaatttgctttcgaatttctgccattcatccgcttattatcacttattcaggcgtagcaccaggcgtttaagggcaccaataactgccttaaaaaaattacgccccgccctgccactcatcgcagtactgttgtaattcattaagcattctgccgacatggaagccatcacagacggcatgatgaacctgaatcgccagcggcatcagcaccttgtcgccttgcgtataatatttgcccatggtgaaaacgggggcgaagaagttgtccatattggccacgtttaaatcaaaactggtgaaactcacccagggattggctgagacgaaaaacatattctcaataaaccctttagggaaataggccaggttttcaccgtaacacgccacatcttgcgaatatatgtgtagaaactgccggaaatcgtcgtggtattcactccagagcgatgaaaacgtttcagtttgctcatggaaaacggtgtaacaagggtgaacactatcccatatcaccagctcaccgtctttcattgccatacggaattccggatgagcattcatcaggcgggcaagaatgtgaataaaggccggataaaacttgtgcttatttttctttacggtctttaaaaaggccgtaatatccagctgaacggtctggttataggtacattgagcaactgactgaaatgcctcaaaatgttctttacgatgccattgggatatatcaacggtggtatatccagtgatttttttctccattttagcttccttagctcctgaaaatctcgataactcaaaaaatacgcccggtagtgatcttatttcattatggtgaaagttggaacctcttacgtgccgatcaacgtctcattttcgccaaaagttggcccagggcttcccggtatcaacagggacaccaggatttatttattctgcgaagtgatcttccgtcacaggtatttattcggcgcaaagtgcgtcgggtgatgctgccaacttactgatttagtgtatgatggtgtttttgaggtgctccagtggcttctgtttctatcagctgtccctcctgttcagctactgacggggtggtgcgtaacggcaaaagcaccgccggacatcagcgctagcggagtgtatactggcttactatgttggcactgatgagggtgtcagtgaagtgcttcatgtggcaggagaaaaaaggctgcaccggtgcgtcagcagaatatgtgatacaggatatattccgcttcctcgctcactgactcgctacgctcggtcgttcgactgcggcgagcggaaatggcttacgaacggggcggagatttcctggaagatgccaggaagatacttaacagggaagtgagagggccgcggcaaagccgtttttccataggctccgcccccctgacaagcatcacgaaatctgacgctcaaatcagtggtggcgaaacccgacaggactataaagataccaggcgtttccccctggcggctccctcgtgcgctctcctgttcctgcctttcggtttaccggtgtcattccgctgttatggccgcgtttgtctcattccacgcctgacactcagttccgggtaggcagttcgctccaagctggactgtatgcacgaaccccccgttcagtccgaccgctgcgccttatccggtaactatcgtcttgagtccaacccggaaagacatgcaaaagcaccactggcagcagccactggtaattgatttagaggagttagtcttgaagtcatgcgccggttaaggctaaactgaaaggacaagttttggtgactgcgctcctccaagccagttacctcggttcaaagagttggtagctcagagaaccttcgaaaaaccgccctgcaaggcggttttttcgttttcagagcaagagattacgcgcagaccaaaacgatctcaagaagatcatcttattaatcagataaaatatttgctcatgagcccgaagtggcgagcccgatcttccccatcggtgatgtcggcgatataggcgccagcaaccgcacctgtggcgccggtgatgccggccacgatgcgtccggcgtagaggatctgctcatgtttgacagcttatcatcgatgcataatgtgcctgtcaaatggacgaagcagggattctgcaaaccctatgctactccgtcaagccgtcaattgtctgattcgttaccaattatgacaacttgacggctacatcattcactttttcttcacaaccggcacggaactcgctcgggctggccccggtgcattttttaaatacccgcgagaaatagagttgatcgtcaaaaccaacattgcgaccgacggtggcgataggcatccgggtggtgctcaaaagcagcttcgcctggctgatacgttggtcctcgcgccagcttaagacgctaatccctaactgctggcggaaaagatgtgacagacgcgacggcgacaagcaaacatgctgtgcgacgctggcgatatcaaaattgctgtctgccaggtgatcgctgatgtactgacaagcctcgcgtacccgattatccatcggtggatggagcgactcgttaatcgcttccatgcgccgcagtaacaattgctcaagcagatttatcgccagcagctccgaatagcgcccttccccttgcccggcgttaatgatttgcccaaacaggtcgctgaaatgcggctggtgcgcttcatccgggcgaaagaaccccgtattggcaaatattgacggccagttaagccattcatgccagtaggcgcgcggacgaaagtaaacccactggtgataccattcgcgagcctccggatgacgaccgtagtgatgaatctctcctggcgggaacagcaaaatatcacccggtcggcaaacaaattctcgtccctgatttttcaccaccccctgaccgcgaatggtgagattgagaatataacctttcattcccagcggtcggtcgataaaaaaatcgagataaccgttggcctcaatcggcgttaaacccgccaccagatgggcattaaacgagtatcccggcagcaggggatcattttgcgcttcagccatacttttcatactcccgccattcagagaagaaaccaattgtccatattgcatcagacattgccgtcactgcgtcttttactggctcttctcgctaaccaaaccggtaaccccgcttattaaaagcattctgtaacaaagcgggaccaaagccatgacaaaaacgcgtaacaaaagtgtctataatcacggcagaaaagtccacattgattatttgcacggcgtcacactttgctatgccatagcatttttatccataagattagcggatcctacctgacgctttttatcgcaactctctactgtttctccatacccgtttttttgggctagcgaattcgagctcggtacccggggatgtgaactgccgtataggcagccaagattaggaccggaaggtagcagccaaggcgggggacattttctgccgtaaaggcagatattatttgcgagagtagggaactgccaggcatcaaataaaacgaaaggctcagtcgaaagactgggcctttcgttttatctgttgtttgtcggtgaacgctctcctgagtaggacaaatccgccgggagcggatttgaacgttgcgaagcaacggcccggagggtggcgggcaggacgcccgccataaactgccaggcatcaaattaagcagaaggccatcctgacggatggcctttttgcgtttctacaaactcttttgtttatttttctaaatacattcaaatatgtatccgctcatgagacaataaccctgataaatgcttcaataatattgaaaaaggaagagtatgagtattcaacatttccgtgtcgcccttattcccttttttgcggcattttgccttcctgtttttgctcacccagaaacgctggtgaaagtaaaagatgctgaagatcagttggggcaaactattaactggcgaactacttactctagcttcccggcaacaattaatagactggatggaggcggataaagttgcaggaccacttctgcgctcggcccttccggctggctggtttattgctgataaatctggagc

SEQ ID NO: 5583 - DNA, 5232 bp, Artificial Sequence
  Description of Artificial Sequence: Synthetic polynucleotide
cggtgagcgtgggactcgcggtatcattgcagcactggggccagatggtaagccctcccgtatcgtagttatctacacgacggggagtcaggcaactatggatgaacgaaatagacagatcgctgagataggtgcctcactgattaagcattggtaactgtcagaccaagtttactcatatatactttagattgatttacgcgccctgtagcggcgcattaagcgcggcgggtgtggtggttacgcgcagcgtgaccgctacacttgccagcgccctagcgcccgctcctttcgctttcttcccttcctttctcgccacgttcgccggctttccccgtcaagctctaaatcgggggctccctttagggttccgatttagtgctttacggcacctcgaccccaaaaaacttgatttgggtgatggttcacgtagtgggccatcgccctgatagacggtttttcgccctttgacgttggagtccacgttctttaatagtggactcttgttccaaacttgaacaacactcaaccctatctcgggctattcttttgatttataagggattttgccgatttcggcctattggttaaaaaatgagctgatttaacaaaaatttaacgcgaattttaacaaaatattaacgtttacaatttaaaaggatctaggtgaagatcctttttgataatctcatgaccaaaatcccttaacgtgagttttcgttccactgagcgtcagaccccgtagaaaagatcaaaggatcttcttgagatcctttttttctgcgcgtaatctgctgcttgcaaacaaaaaaaccaccgctaccagcggtggtttgtttgccggatcaagagctaccaactctttttccgaaggtaactggcttcagcagagcgcagataccaaatactgtccttctagtgtagccgtagttaggccaccacttcaagaactctgtagcaccgcctacatacctcgctctgctaatcctgttaccagtcaggcatttgagaagcacacggtcacactgcttccggtagtcaataaaccggtaaaccagcaatagacataagcggctatttaacgaccctgccctgaaccgacgaccgggtcgaatttgctttcgaatttctgccattcatccgcttattatcacttattcaggcgtagcaccaggcgtttaagggcaccaataactgccttaaaaaaattacgccccgccctgccactcatcgcagtactgttgtaattcattaagcattctgccgacatggaagccatcacagacggcatgatgaacctgaatcgccagcggcatcagcaccttgtcgccttgcgtataatatttgcccatggtgaaaacgggggcgaagaagttgtccatattggccacgtttaaatcaaaactggtgaaactcacccagggattggctgagacgaaaaacatattctcaataaaccctttagggaaataggccaggttttcaccgtaacacgccacatcttgcgaatatatgtgtagaaactgccggaaatcgtcgtggtattcactccagagcgatgaaaacgtttcagtttgctcatggaaaacggtgtaacaagggtgaacactatcccatatcaccagctcaccgtctttcattgccatacggaattccggatgagcattcatcaggcgggcaagaatgtgaataaaggccggataaaacttgtgcttatttttctttacggtctttaaaaaggccgtaatatccagctgaacggtctggttataggtacattgagcaactgactgaaatgcctcaaaatgttctttacgatgccattgggatatatcaacggtggtatatccagtgatttttttctccattttagcttccttagctcctgaaaatctcgataactcaaaaaatacgcccggtagtgatcttatttcattatggtgaaagttggaacctcttacgtgccgatcaacgtctcattttcgccaaaagttggcccagggcttcccggtatcaacagggacaccaggatttatttattctgcgaagtgatcttccgtcacaggtatttattcggcgcaaagtgcgtcgggtgatgctgccaacttactgatttagtgtatgatggtgtttttgaggtgctccagtggcttctgtttctatcagctgtccctcctgttcagctactgacggggtggtgcgtaacggcaaaagcaccgccggacatcagcgctagcggagtgtatactggcttactatgttggcactgatgagggtgtcagtgaagtgcttcatgtggcaggagaaaaaaggctgcaccggtgcgtcagcagaatatgtgatacaggatatattccgcttcctcgctcactgactcgctacgctcggtcgttcgactgcggcgagcggaaatggcttacgaacggggcggagatttcctggaagatgccaggaagatacttaacagggaagtgagagggccgcggcaaagccgtttttccataggctccgcccccctgacaagcatcacgaaatctgacgctcaaatcagtggtggcgaaacccgacaggactataaagataccaggcgtttccccctggcggctccctcgtgcgctctcctgttcctgcctttcggtttaccggtgtcattccgctgttatggccgcgtttgtctcattccacgcctgacactcagttccgggtaggcagttcgctccaagctggactgtatgcacgaaccccccgttcagtccgaccgctgcgccttatccggtaactatcgtcttgagtccaacccggaaagacatgcaaaagcaccactggcagcagccactggtaattgatttagaggagttagtcttgaagtcatgcgccggttaaggctaaactgaaaggacaagttttggtgactgcgctcctccaagccagttacctcggttcaaagagttggtagctcagagaaccttcgaaaaaccgccctgcaaggcggttttttcgttttcagagcaagagattacgcgcagaccaaaacgatctcaagaagatcatcttattaatcagataaaatatttgctcatgagcccgaagtggcgagcccgatcttccccatcggtgatgtcggcgatataggcgccagcaaccgcacctgtggcgccggtgatgccggccacgatgcgtccggcgtagaggatctgctcatgtttgacagcttatcatcgatgcataatgtgcctgtcaaatggacgaagcagggattctgcaaaccctatgctactccgtcaagccgtcaattgtctgattcgttaccaattatgacaacttgacggctacatcattcactttttcttcacaaccggcacggaactcgctcgggctggccccggtgcattttttaaatacccgcgagaaatagagttgatcgtcaaaaccaacattgcgaccgacggtggcgataggcatccgggtggtgctcaaaagcagcttcgcctggctgatacgttggtcctcgcgccagcttaagacgctaatccctaactgctggcggaaaagatgtgacagacgcgacggcgacaagcaaacatgctgtgcgacgctggcgatatcaaaattgctgtctgccaggtgatcgctgatgtactgacaagcctcgcgtacccgattatccatcggtggatggagcgactcgttaatcgcttccatgcgccgcagtaacaattgctcaagcagatttatcgccagcagctccgaatagcgcccttccccttgcccggcgttaatgatttgcccaaacaggtcgctgaaatgcggctggtgcgcttcatccgggcgaaagaaccccgtattggcaaatattgacggccagttaagccattcatgccagtaggcgcgcggacgaaagtaaacccactggtgataccattcgcgagcctccggatgacgaccgtagtgatgaatctctcctggcgggaacagcaaaatatcacccggtcggcaaacaaattctcgtccctgatttttcaccaccccctgaccgcgaatggtgagattgagaatataacctttcattcccagcggtcggtcgataaaaaaatcgagataaccgttggcctcaatcggcgttaaacccgccaccagatgggcattaaacgagtatcccggcagcaggggatcattttgcgcttcagccatacttttcatactcccgccattcagagaagaaaccaattgtccatattgcatcagacattgccgtcactgcgtcttttactggctcttctcgctaaccaaaccggtaaccccgcttattaaaagcattctgtaacaaagcgggaccaaagccatgacaaaaacgcgtaacaaaagtgtctataatcacggcagaaaagtccacattgattatttgcacggcgtcacactttgctatgccatagcatttttatccataagattagcggatcctacctgacgctttttatcgcaactctctactgtttctccatacccgtttttttgggctagcgaattcgagctcggtacccggggatgtgaactgccgtataggcagccaagattcaacttaatcgccttgcagcacatccccctttattttctgccgtaaaggcagatattatttgcgagagtagggaactgccaggcatcaaataaaacgaaaggctcagtcgaaagactgggcctttcgttttatctgttgtttgtcggtgaacgctctcctgagtaggacaaatccgccgggagcggatttgaacgttgcgaagcaacggcccggagggtggcgggcaggacgcccgccataaactgccaggcatcaaattaagcagaaggccatcctgacggatggcctttttgcgtttctacaaactcttttgtttatttttctaaatacattcaaatatgtatccgctcatgagacaataaccctgataaatgcttcaataatattgaaaaaggaagagtatgagtattcaacatttccgtgtcgcccttattcccttttttgcggcattttgccttcctgtttttgctcacccagaaacgctggtgaaagtaaaagatgctgaagatcagttggggcaaactattaactggcgaactacttactctagcttcccggcaacaattaatagactggatggaggcggataaagttgcaggaccacttctgcgctcggcccttccggctggctggtttattgctgataaatctggagc

SEQ ID NO: 5584 - DNA, 5232 bp, Artificial Sequence
  Description of Artificial Sequence: Synthetic polynucleotide
cggtgagcgtgggactcgcggtatcattgcagcactggggccagatggtaagccctcccgtatcgtagttatctacacgacggggagtcaggcaactatggatgaacgaaatagacagatcgctgagataggtgcctcactgattaagcattggtaactgtcagaccaagtttactcatatatactttagattgatttacgcgccctgtagcggcgcattaagcgcggcgggtgtggtggttacgcgcagcgtgaccgctacacttgccagcgccctagcgcccgctcctttcgctttcttcccttcctttctcgccacgttcgccggctttccccgtcaagctctaaatcgggggctccctttagggttccgatttagtgctttacggcacctcgaccccaaaaaacttgatttgggtgatggttcacgtagtgggccatcgccctgatagacggtttttcgccctttgacgttggagtccacgttctttaatagtggactcttgttccaaacttgaacaacactcaaccctatctcgggctattcttttgatttataagggattttgccgatttcggcctattggttaaaaaatgagctgatttaacaaaaatttaacgcgaattttaacaaaatattaacgtttacaatttaaaaggatctaggtgaagatcctttttgataatctcatgaccaaaatcccttaacgtgagttttcgttccactgagcgtcagaccccgtagaaaagatcaaaggatcttcttgagatcctttttttctgcgcgtaatctgctgcttgcaaacaaaaaaaccaccgctaccagcggtggtttgtttgccggatcaagagctaccaactctttttccgaaggtaactggcttcagcagagcgcagataccaaatactgtccttctagtgtagccgtagttaggccaccacttcaagaactctgtagcaccgcctacatacctcgctctgctaatcctgttaccagtcaggcatttgagaagcacacggtcacactgcttccggtagtcaataaaccggtaaaccagcaatagacataagcggctatttaacgaccctgccctgaaccgacgaccgggtcgaatttgctttcgaatttctgccattcatccgcttattatcacttattcaggcgtagcaccaggcgtttaagggcaccaataactgccttaaaaaaattacgccccgccctgccactcatcgcagtactgttgtaattcattaagcattctgccgacatggaagccatcacagacggcatgatgaacctgaatcgccagcggcatcagcaccttgtcgccttgcgtataatatttgcccatggtgaaaacgggggcgaagaagttgtccatattggccacgtttaaatcaaaactggtgaaactcacccagggattggctgagacgaaaaacatattctcaataaaccctttagggaaataggccaggttttcaccgtaacacgccacatcttgcgaatatatgtgtagaaactgccggaaatcgtcgtggtattcactccagagcgatgaaaacgtttcagtttgctcatggaaaacggtgtaacaagggtgaacactatcccatatcaccagctcaccgtctttcattgccatacggaattccggatgagcattcatcaggcgggcaagaatgtgaataaaggccggataaaacttgtgcttatttttctttacggtctttaaaaaggccgtaatatccagctgaacggtctggttataggtacattgagcaactgactgaaatgcctcaaaatgttctttacgatgccattgggatatatcaacggtggtatatccagtgatttttttctccattttagcttccttagctcctgaaaatctcgataactcaaaaaatacgcccggtagtgatcttatttcattatggtgaaagttggaacctcttacgtgccgatcaacgtctcattttcgccaaaagttggcccagggcttcccggtatcaacagggacaccaggatttatttattctgcgaagtgatcttccgtcacaggtatttattcggcgcaaagtgcgtcgggtgatgctgccaacttactgatttagtgtatgatggtgtttttgaggtgctccagtggcttctgtttctatcagctgtccctcctgttcagctactgacggggtggtgcgtaacggcaaaagcaccgccggacatcagcgctagcggagtgtatactggcttactatgttggcactgatgagggtgtcagtgaagtgcttcatgtggcaggagaaaaaaggctgcaccggtgcgtcagcagaatatgtgatacaggatatattccgcttcctcgctcactgactcgctacgctcggtcgttcgactgcggcgagcggaaatggcttacgaacggggcggagatttcctggaagatgccaggaagatacttaacagggaagtgagagggccgcggcaaagccgtttttccataggctccgcccccctgacaagcatcacgaaatctgacgctcaaatcagtggtggcgaaacccgacaggactataaagataccaggcgtttccccctggcggctccctcgtgcgctctcctgttcctgcctttcggtttaccggtgtcattccgctgttatggccgcgtttgtctcattccacgcctgacactcagttccgggtaggcagttcgctccaagctggactgtatgcacgaaccccccgttcagtccgaccgctgcgccttatccggtaactatcgtcttgagtccaacccggaaagacatgcaaaagcaccactggcagcagccactggtaattgatttagaggagttagtcttgaagtcatgcgccggttaaggctaaactgaaaggacaagttttggtgactgcgctcctccaagccagttacctcggttcaaagagttggtagctcagagaaccttcgaaaaaccgccctgcaaggcggttttttcgttttcagagcaagagattacgcgcagaccaaaacgatctcaagaagatcatcttattaatcagataaaatatttgctcatgagcccgaagtggcgagcccgatcttccccatcggtgatgtcggcgatataggcgccagcaaccgcacctgtggcgccggtgatgccggccacgatgcgtccggcgtagaggatctgctcatgtttgacagcttatcatcgatgcataatgtgcctgtcaaatggacgaagcagggattctgcaaaccctatgctactccgtcaagccgtcaattgtctgattcgttaccaattatgacaacttgacggctacatcattcactttttcttcacaaccggcacggaactcgctcgggctggccccggtgcattttttaaatacccgcgagaaatagagttgatcgtcaaaaccaacattgcgaccgacggtggcgataggcatccgggtggtgctcaaaagcagcttcgcctggctgatacgttggtcctcgcgccagcttaagacgctaatccctaactgctggcggaaaagatgtgacagacgcgacggcgacaagcaaacatgctgtgcgacgctggcgatatcaaaattgctgtctgccaggtgatcgctgatgtactgacaagcctcgcgtacccgattatccatcggtggatggagcgactcgttaatcgcttccatgcgccgcagtaacaattgctcaagcagatttatcgccagcagctccgaatagcgcccttccccttgcccggcgttaatgatttgcccaaacaggtcgctgaaatgcggctggtgcgcttcatccgggcgaaagaaccccgtattggcaaatattgacggccagttaagccattcatgccagtaggcgcgcggacgaaagtaaacccactggtgataccattcgcgagcctccggatgacgaccgtagtgatgaatctctcctggcgggaacagcaaaatatcacccggtcggcaaacaaattctcgtccctgatttttcaccaccccctgaccgcgaatggtgagattgagaatataacctttcattcccagcggtcggtcgataaaaaaatcgagataaccgttggcctcaatcggcgttaaacccgccaccagatgggcattaaacgagtatcccggcagcaggggatcattttgcgcttcagccatacttttcatactcccgccattcagagaagaaaccaattgtccatattgcatcagacattgccgtcactgcgtcttttactggctcttctcgctaaccaaaccggtaaccccgcttattaaaagcattctgtaacaaagcgggaccaaagccatgacaaaaacgcgtaacaaaagtgtctataatcacggcagaaaagtccacattgattatttgcacggcgtcacactttgctatgccatagcatttttatccataagattagcggatcctacctgacgctttttatcgcaactctctactgtttctccatacccgtttttttgggctagcgaattcgagctcggtacccggggatgtgaactgccgtataggcagccaagattcgtaggtagtcacgcaactcgccgcacatctgattttctgccgtaaaggcagatattatttgcgagagtagggaactgccaggcatcaaataaaacgaaaggctcagtcgaaagactgggcctttcgttttatctgttgtttgtcggtgaacgctctcctgagtaggacaaatccgccgggagcggatttgaacgttgcgaagcaacggcccggagggtggcgggcaggacgcccgccataaactgccaggcatcaaattaagcagaaggccatcctgacggatggcctttttgcgtttctacaaactcttttgtttatttttctaaatacattcaaatatgtatccgctcatgagacaataaccctgataaatgcttcaataatattgaaaaaggaagagtatgagtattcaacatttccgtgtcgcccttattcccttttttgcggcattttgccttcctgtttttgctcacccagaaacgctggtgaaagtaaaagatgctgaagatcagttggggcaaactattaactggcgaactacttactctagcttcccggcaacaattaatagactggatggaggcggataaagttgcaggaccacttctgcgctcggcccttccggctggctggtttattgctgataaatctggagc

SEQ ID NO: 5585 - DNA, 5232 bp, Artificial Sequence
  Description of Artificial Sequence: Synthetic polynucleotide
cggtgagcgtgggactcgcggtatcattgcagcactggggccagatggtaagccctcccgtatcgtagttatctacacgacggggagtcaggcaactatggatgaacgaaatagacagatcgctgagataggtgcctcactgattaagcattggtaactgtcagaccaagtttactcatatatactttagattgatttacgcgccctgtagcggcgcattaagcgcggcgggtgtggtggttacgcgcagcgtgaccgctacacttgccagcgccctagcgcccgctcctttcgctttcttcccttcctttctcgccacgttcgccggctttccccgtcaagctctaaatcgggggctccctttagggttccgatttagtgctttacggcacctcgaccccaaaaaacttgatttgggtgatggttcacgtagtgggccatcgccctgatagacggtttttcgccctttgacgttggagtccacgttctttaatagtggactcttgttccaaacttgaacaacactcaaccctatctcgggctattcttttgatttataagggattttgccgatttcggcctattggttaaaaaatgagctgatttaacaaaaatttaacgcgaattttaacaaaatattaacgtttacaatttaaaaggatctaggtgaagatcctttttgataatctcatgaccaaaatcccttaacgtgagttttcgttccactgagcgtcagaccccgtagaaaagatcaaaggatcttcttgagatcctttttttctgcgcgtaatctgctgcttgcaaacaaaaaaaccaccgctaccagcggtggtttgtttgccggatcaagagctaccaactctttttccgaaggtaactggcttcagcagagcgcagataccaaatactgtccttctagtgtagccgtagttaggccaccacttcaagaactctgtagcaccgcctacatacctcgctctgctaatcctgttaccagtcaggcatttgagaagcacacggtcacactgcttccggtagtcaataaaccggtaaaccagcaatagacataagcggctatttaacgaccctgccctgaaccgacgaccgggtcgaatttgctttcgaatttctgccattcatccgcttattatcacttattcaggcgtagcaccaggcgtttaagggcaccaataactgccttaaaaaaattacgccccgccctgccactcatcgcagtactgttgtaattcattaagcattctgccgacatggaagccatcacagacggcatgatgaacctgaatcgccagcggcatcagcaccttgtcgccttgcgtataatatttgcccatggtgaaaacgggggcgaagaagttgtccatattggccacgtttaaatcaaaactggtgaaactcacccagggattggctgagacgaaaaacatattctcaataaaccctttagggaaataggccaggttttcaccgtaacacgccacatcttgcgaatatatgtgtagaaactgccggaaatcgtcgtggtattcactccagagcgatgaaaacgtttcagtttgctcatggaaaacggtgtaacaagggtgaacactatcccatatcaccagctcaccgtctttcattgccatacggaattccggatgagcattcatcaggcgggcaagaatgtgaataaaggccggataaaacttgtgcttatttttctttacggtctttaaaaaggccgtaatatccagctgaacggtctggttataggtacattgagcaactgactgaaatgcctcaaaatgttctttacgatgccattgggatatatcaacggtggtatatccagtgatttttttctccattttagcttccttagctcctgaaaatctcgataactcaaaaaatacgcccggtagtgatcttatttcattatggtgaaagttggaacctcttacgtgccgatcaacgtctcattttcgccaaaagttggcccagggcttcccggtatcaacagggacaccaggatttatttattctgcgaagtgatcttccgtcacaggtatttattcggcgcaaagtgcgtcgggtgatgctgccaacttactgatttagtgtatgatggtgtttttgaggtgctccagtggcttctgtttctatcagctgtccctcctgttcagctactgacggggtggtgcgtaacggcaaaagcaccgccggacatcagcgctagcggagtgtatactggcttactatgttggcactgatgagggtgtcagtgaagtgcttcatgtggcaggagaaaaaaggctgcaccggtgcgtcagcagaatatgtgatacaggatatattccgcttcctcgctcactgactcgctacgctcggtcgttcgactgcggcgagcggaaatggcttacgaacggggcggagatttcctggaagatgccaggaagatacttaacagggaagtgagagggccgcggcaaagccgtttttccataggctccgcccccctgacaagcatcacgaaatctgacgctcaaatcagtggtggcgaaacccgacaggactataaagataccaggcgtttccccctggcggctccctcgtgcgctctcctgttcctgcctttcggtttaccggtgtcattccgctgttatggccgcgtttgtctcattccacgcctgacactcagttccgggtaggcagttcgctccaagctggactgtatgcacgaaccccccgttcagtccgaccgctgcgccttatccggtaactatcgtcttgagtccaacccggaaagacatgcaaaagcaccactggcagcagccactggtaattgatttagaggagttagtcttgaagtcatgcgccggttaaggctaaactgaaaggacaagttttggtgactgcgctcctccaagccagttacctcggttcaaagagttggtagctcagagaaccttcgaaaaaccgccctgcaaggcggttttttcgttttcagagcaagagattacgcgcagaccaaaacgatctcaagaagatcatcttattaatcagataaaatatttgctcatgagcccgaagtggcgagcccgatcttccccatcggtgatgtcggcgatataggcgccagcaaccgcacctgtggcgccggtgatgccggccacgatgcgtccggcgtagaggatctgctcatgtttgacagcttatcatcgatgcataatgtgcctgtcaaatggacgaagcagggattctgcaaaccctatgctactccgtcaagccgtcaattgtctgattcgttaccaattatgacaacttgacggctacatcattcactttttcttcacaaccggcacggaactcgctcgggctggccccggtgcattttttaaatacccgcgagaaatagagttgatcgtcaaaaccaacattgcgaccgacggtggcgataggcatccgggtggtgctcaaaagcagcttcgcctggctgatacgttggtcctcgcgccagcttaagacgctaatccctaactgctggcggaaaagatgtgacagacgcgacggcgacaagcaaacatgctgtgcgacgctggcgatatcaaaattgctgtctgccaggtgatcgctgatgtactgacaagcctcgcgtacccgattatccatcggtggatggagcgactcgttaatcgcttccatgcgccgcagtaacaattgctcaagcagatttatcgccagcagctccgaatagcgcccttccccttgcccggcgttaatgatttgcccaaacaggtcgctgaaatgcggctggtgcgcttcatccgggcgaaagaaccccgtattggcaaatattgacggccagttaagccattcatgccagtaggcgcgcggacgaaagtaaacccactggtgataccattcgcgagcctccggatgacgaccgtagtgatgaatctctcctggcgggaacagcaaaatatcacccggtcggcaaacaaattctcgtccctgatttttcaccaccccctgaccgcgaatggtgagattgagaatataacctttcattcccagcggtcggtcgataaaaaaatcgagataaccgttggcctcaatcggcgttaaacccgccaccagatgggcattaaacgagtatcccggcagcaggggatcattttgcgcttcagccatacttttcatactcccgccattcagagaagaaaccaattgtccatattgcatcagacattgccgtcactgcgtcttttactggctcttctcgctaaccaaaccggtaaccccgcttattaaaagcattctgtaacaaagcgggaccaaagccatgacaaaaacgcgtaacaaaagtgtctataatcacggcagaaaagtccacattgattatttgcacggcgtcacactttgctatgccatagcatttttatccataagattagcggatcctacctgacgctttttatcgcaactctctactgtttctccatacccgtttttttgggctagcgaattcgagctcggtacccggggatgtgaactgccgtataggcagccaagatttacgggtaacagtttctttatggcagggtgaaattttctgccgtaaaggcagatattatttgcgagagtagggaactgccaggcatcaaataaaacgaaaggctcagtcgaaagactgggcctttcgttttatctgttgtttgtcggtgaacgctctcctgagtaggacaaatccgccgggagcggatttgaacgttgcgaagcaacggcccggagggtggcgggcaggacgcccgccataaactgccaggcatcaaattaagcagaaggccatcctgacggatggcctttttgcgtttctacaaactcttttgtttatttttctaaatacattcaaatatgtatccgctcatgagacaataaccctgataaatgcttcaataatattgaaaaaggaagagtatgagtattcaacatttccgtgtcgcccttattcccttttttgcggcattttgccttcctgtttttgctcacccagaaacgctggtgaaagtaaaagatgctgaagatcagttggggcaaactattaactggcgaactacttactctagcttcccggcaacaattaatagactggatggaggcggataaagttgcaggaccacttctgcgctcggcccttccggctggctggtttattgctgataaatctggagc

SEQ ID NO: 5586 - DNA, 5232 bp, Artificial Sequence
  Description of Artificial Sequence: Synthetic polynucleotide
cggtgagcgtgggactcgcggtatcattgcagcactggggccagatggtaagccctcccgtatcgtagttatctacacgacggggagtcaggcaactatggatgaacgaaatagacagatcgctgagataggtgcctcactgattaagcattggtaactgtcagaccaagtttactcatatatactttagattgatttacgcgccctgtagcggcgcattaagcgcggcgggtgtggtggttacgcgcagcgtgaccgctacacttgccagcgccctagcgcccgctcctttcgctttcttcccttcctttctcgccacgttcgccggctttccccgtcaagctctaaatcgggggctccctttagggttccgatttagtgctttacggcacctcgaccccaaaaaacttgatttgggtgatggttcacgtagtgggccatcgccctgatagacggtttttcgccctttgacgttggagtccacgttctttaatagtggactcttgttccaaacttgaacaacactcaaccctatctcgggctattcttttgatttataagggattttgccgatttcggcctattggttaaaaaatgagctgatttaacaaaaatttaacgcgaattttaacaaaatattaacgtttacaatttaaaaggatctaggtgaagatcctttttgataatctcatgaccaaaatcccttaacgtgagttttcgttccactgagcgtcagaccccgtagaaaagatcaaaggatcttcttgagatcctttttttctgcgcgtaatctgctgcttgcaaacaaaaaaaccaccgctaccagcggtggtttgtttgccggatcaagagctaccaactctttttccgaaggtaactggcttcagcagagcgcagataccaaatactgtccttctagtgtagccgtagttaggccaccacttcaagaactctgtagcaccgcctacatacctcgctctgctaatcctgttaccagtcaggcatttgagaagcacacggtcacactgcttccggtagtcaataaaccggtaaaccagcaatagacataagcggctatttaacgaccctgccctgaaccgacgaccgggtcgaatttgctttcgaatttctgccattcatccgcttattatcacttattcaggcgtagcaccaggcgtttaagggcaccaataactgccttaaaaaaattacgccccgccctgccactcatcgcagtactgttgtaattcattaagcattctgccgacatggaagccatcacagacggcatgatgaacctgaatcgccagcggcatcagcaccttgtcgccttgcgtataatatttgcccatggtgaaaacgggggcgaagaagttgtccatattggccacgtttaaatcaaaactggtgaaactcacccagggattggctgagacgaaaaacatattctcaataaaccctttagggaaataggccaggttttcaccgtaacacgccacatcttgcgaatatatgtgtagaaactgccggaaatcgtcgtggtattcactccagagcgatgaaaacgtttcagtttgctcatggaaaacggtgtaacaagggtgaacactatcccatatcaccagctcaccgtctttcattgccatacggaattccggatgagcattcatcaggcgggcaagaatgtgaataaaggccggataaaacttgtgcttatttttctttacggtctttaaaaaggccgtaatatccagctgaacggtctggttataggtacattgagcaactgactgaaatgcctcaaaatgttctttacgatgccattgggatatatcaacggtggtatatccagtgatttttttctccattttagcttccttagctcctgaaaatctcgataactcaaaaaatacgcccggtagtgatcttatttcattatggtgaaagttggaacctcttacgtgccgatcaacgtctcattttcgccaaaagttggcccagggcttcccggtatcaacagggacaccaggatttatttattctgcgaagtgatcttccgtcacaggtatttattcggcgcaaagtgcgtcgggtgatgctgccaacttactgatttagtgtatgatggtgtttttgaggtgctccagtggcttctgtttctatcagctgtccctcctgttcagctactgacggggtggtgcgtaacggcaaaagcaccgccggacatcagcgctagcggagtgtatactggcttactatgttggcactgatgagggtgtcagtgaagtgcttcatgtggcaggagaaaaaaggctgcaccggtgcgtcagcagaatatgtgatacaggatatattccgcttcctcgctcactgactcgctacgctcggtcgttcgactgcggcgagcggaaatggcttacgaacggggcggagatttcctggaagatgccaggaagatacttaacagggaagtgagagggccgcggcaaagccgtttttccataggctccgcccccctgacaagcatcacgaaatctgacgctcaaatcagtggtggcgaaacccgacaggactataaagataccaggcgtttccccctggcggctccctcgtgcgctctcctgttcctgcctttcggtttaccggtgtcattccgctgttatggccgcgtttgtctcattccacgcctgacactcagttccgggtaggcagttcgctccaagctggactgtatgcacgaaccccccgttcagtccgaccgctgcgccttatccggtaactatcgtcttgagtccaacccggaaagacatgcaaaagcaccactggcagcagccactggtaattgatttagaggagttagtcttgaagtcatgcgccggttaaggctaaactgaaaggacaagttttggtgactgcgctcctccaagccagttacctcggttcaaagagttggtagctcagagaaccttcgaaaaaccgccctgcaaggcggttttttcgttttcagagcaagagattacgcgcagaccaaaacgatctcaagaagatcatcttattaatcagataaaatatttgctcatgagcccgaagtggcgagcccgatcttccccatcggtgatgtcggcgatataggcgccagcaaccgcacctgtggcgccggtgatgccggccacgatgcgtccggcgtagaggatctgctcatgtttgacagcttatcatcgatgcataatgtgcctgtcaaatggacgaagcagggattctgcaaaccctatgctactccgtcaagccgtcaattgtctgattcgttaccaattatgacaacttgacggctacatcattcactttttcttcacaaccggcacggaactcgctcgggctggccccggtgcattttttaaatacccgcgagaaatagagttgatcgtcaaaaccaacattgcgaccgacggtggcgataggcatccgggtggtgctcaaaagcagcttcgcctggctgatacgttggtcctcgcgccagcttaagacgctaatccctaactgctggcggaaaagatgtgacagacgcgacggcgacaagcaaacatgctgtgcgacgctggcgatatcaaaattgctgtctgccaggtgatcgctgatgtactgacaagcctcgcgtacccgattatccatcggtggatggagcgactcgttaatcgcttccatgcgccgcagtaacaattgctcaagcagatttatcgccagcagctccgaatagcgcccttccccttgcccggcgttaatgatttgcccaaacaggtcgctgaaatgcggctggtgcgcttcatccgggcgaaagaaccccgtattggcaaatattgacggccagttaagccattcatgccagtaggcgcgcggacgaaagtaaacccactggtgataccattcgcgagcctccggatgacgaccgtagtgatgaatctctcctggcgggaacagcaaaatatcacccggtcggcaaacaaattctcgtccctgatttttcaccaccccctgaccgcgaatggtgagattgagaatataacctttcattcccagcggtcggtcgataaaaaaatcgagataaccgttggcctcaatcggcgttaaacccgccaccagatgggcattaaacgagtatcccggcagcaggggatcattttgcgcttcagccatacttttcatactcccgccattcagagaagaaaccaattgtccatattgcatcagacattgccgtcactgcgtcttttactggctcttctcgctaaccaaaccggtaaccccgcttattaaaagcattctgtaacaaagcgggaccaaagccatgacaaaaacgcgtaacaaaagtgtctataatcacggcagaaaagtccacattgattatttgcacggcgtcacactttgctatgccatagcatttttatccataagattagcggatcctacctgacgctttttatcgcaactctctactgtttctccatacccgtttttttgggctagcgaattcgagctcggtacccggggatgtgaactgccgtataggcagccaagattacagcggatggttcggataatgcgaacagcgcattttctgccgtaaaggcagatattatttgcgagagtagggaactgccaggcatcaaataaaacgaaaggctcagtcgaaagactgggcctttcgttttatctgttgtttgtcggtgaacgctctcctgagtaggacaaatccgccgggagcggatttgaacgttgcgaagcaacggcccggagggtggcgggcaggacgcccgccataaactgccaggcatcaaattaagcagaaggccatcctgacggatggcctttttgcgtttctacaaactcttttgtttatttttctaaatacattcaaatatgtatccgctcatgagacaataaccctgataaatgcttcaataatattgaaaaaggaagagtatgagtattcaacatttccgtgtcgcccttattcccttttttgcggcattttgccttcctgtttttgctcacccagaaacgctggtgaaagtaaaagatgctgaagatcagttggggcaaactattaactggcgaactacttactctagcttcccggcaacaattaatagactggatggaggcggataaagttgcaggaccacttctgcgctcggcccttccggctggctggtttattgctgataaatctggagc

SEQ ID NO: 5587 - DNA, 5232 bp, Artificial Sequence
  Description of Artificial Sequence: Synthetic polynucleotide
cggtgagcgtgggactcgcggtatcattgcagcactggggccagatggtaagccctcccgtatcgtagttatctacacgacggggagtcaggcaactatggatgaacgaaatagacagatcgctgagataggtgcctcactgattaagcattggtaactgtcagaccaagtttactcatatatactttagattgatttacgcgccctgtagcggcgcattaagcgcggcgggtgtggtggttacgcgcagcgtgaccgctacacttgccagcgccctagcgcccgctcctttcgctttcttcccttcctttctcgccacgttcgccggctttccccgtcaagctctaaatcgggggctccctttagggttccgatttagtgctttacggcacctcgaccccaaaaaacttgatttgggtgatggttcacgtagtgggccatcgccctgatagacggtttttcgccctttgacgttggagtccacgttctttaatagtggactcttgttccaaacttgaacaacactcaaccctatctcgggctattcttttgatttataagggattttgccgatttcggcctattggttaaaaaatgagctgatttaacaaaaatttaacgcgaattttaacaaaatattaacgtttacaatttaaaaggatctaggtgaagatcctttttgataatctcatgaccaaaatcccttaacgtgagttttcgttccactgagcgtcagaccccgtagaaaagatcaaaggatcttcttgagatcctttttttctgcgcgtaatctgctgcttgcaaacaaaaaaaccaccgctaccagcggtggtttgtttgccggatcaagagctaccaactctttttccgaaggtaactggcttcagcagagcgcagataccaaatactgtccttctagtgtagccgtagttaggccaccacttcaagaactctgtagcaccgcctacatacctcgctctgctaatcctgttaccagtcaggcatttgagaagcacacggtcacactgcttccggtagtcaataaaccggtaaaccagcaatagacataagcggctatttaacgaccctgccctgaaccgacgaccgggtcgaatttgctttcgaatttctgccattcatccgcttattatcacttattcaggcgtagcaccaggcgtttaagggcaccaataactgccttaaaaaaattacgccccgccctgccactcatcgcagtactgttgtaattcattaagcattctgccgacatggaagccatcacagacggcatgatgaacctgaatcgccagcggcatcagcaccttgtcgccttgcgtataatatttgcccatggtgaaaacgggggcgaagaagttgtccatattggccacgtttaaatcaaaactggtgaaactcacccagggattggctgagacgaaaaacatattctcaataaaccctttagggaaataggccaggttttcaccgtaacacgccacatcttgcgaatatatgtgtagaaactgccggaaatcgtcgtggtattcactccagagcgatgaaaacgtttcagtttgctcatggaaaacggtgtaacaagggtgaacactatcccatatcaccagctcaccgtctttcattgccatacggaattccggatgagcattcatcaggcgggcaagaatgtgaataaaggccggataaaacttgtgcttatttttctttacggtctttaaaaaggccgtaatatccagctgaacggtctggttataggtacattgagcaactgactgaaatgcctcaaaatgttctttacgatgccattgggatatatcaacggtggtatatccagtgatttttttctccattttagcttccttagctcctgaaaatctcgataactcaaaaaatacgcccggtagtgatcttatttcattatggtgaaagttggaacctcttacgtgccgatcaacgtctcattttcgccaaaagttggcccagggcttcccggtatcaacagggacaccaggatttatttattctgcgaagtgatcttccgtcacaggtatttattcggcgcaaagtgcgtcgggtgatgctgccaacttactgatttagtgtatgatggtgtttttgaggtgctccagtggcttctgtttctatcagctgtccctcctgttcagctactgacggggtggtgcgtaacggcaaaagcaccgccggacatcagcgctagcggagtgtatactggcttactatgttggcactgatgagggtgtcagtgaagtgcttcatgtggcaggagaaaaaaggctgcaccggtgcgtcagcagaatatgtgatacaggatatattccgcttcctcgctcactgactcgctacgctcggtcgttcgactgcggcgagcggaaatggcttacgaacggggcggagatttcctggaagatgccaggaagatacttaacagggaagtgagagggccgcggcaaagccgtttttccataggctccgcccccctgacaagcatcacgaaatctgacgctcaaatcagtggtggcgaaacccgacaggactataaagataccaggcgtttccccctggcggctccctcgtgcgctctcctgttcctgcctttcggtttaccggtgtcattccgctgttatggccgcgtttgtctcattccacgcctgacactcagttccgggtaggcagttcgctccaagctggactgtatgcacgaaccccccgttcagtccgaccgctgcgccttatccggtaactatcgtcttgagtccaacccggaaagacatgcaaaagcaccactggcagcagccactggtaattgatttagaggagttagtcttgaagtcatgcgccggttaaggctaaactgaaaggacaagttttggtgactgcgctcctccaagccagttacctcggttcaaagagttggtagctcagagaaccttcgaaaaaccgccctgcaaggcggttttttcgttttcagagcaagagattacgcgcagaccaaaacgatctcaagaagatcatcttattaatcagataaaatatttgctcatgagcccgaagtggcgagcccgatcttccccatcggtgatgtcggcgatataggcgccagcaaccgcacctgtggcgccggtgatgccggccacgatgcgtccggcgtagaggatctgctcatgtttgacagcttatcatcgatgcataatgtgcctgtcaaatggacgaagcagggattctgcaaaccctatgctactccgtcaagccgtcaattgtctgattcgttaccaattatgacaacttgacggctacatcattcactttttcttcacaaccggcacggaactcgctcgggctggccccggtgcattttttaaatacccgcgagaaatagagttgatcgtcaaaaccaacattgcgaccgacggtggcgataggcatccgggtggtgctcaaaagcagcttcgcctggctgatacgttggtcctcgcgccagcttaagacgctaatccctaactgctggcggaaaagatgtgacagacgcgacggcgacaagcaaacatgctgtgcgacgctggcgatatcaaaattgctgtctgccaggtgatcgctgatgtactgacaagcctcgcgtacccgattatccatcggtggatggagcgactcgttaatcgcttccatgcgccgcagtaacaattgctcaagcagatttatcgccagcagctccgaatagcgcccttccccttgcccggcgttaatgatttgcccaaacaggtcgctgaaatgcggctggtgcgcttcatccgggcgaaagaaccccgtattggcaaatattgacggccagttaagccattcatgccagtaggcgcgcggacgaaagtaaacccactggtgataccattcgcgagcctccggatgacgaccgtagtgatgaatctctcctggcgggaacagcaaaatatcacccggtcggcaaacaaattctcgtccctgatttttcaccaccccctgaccgcgaatggtgagattgagaatataacctttcattcccagcggtcggtcgataaaaaaatcgagataaccgttggcctcaatcggcgttaaacccgccaccagatgggcattaaacgagtatcccggcagcaggggatcattttgcgcttcagccatacttttcatactcccgccattcagagaagaaaccaattgtccatattgcatcagacattgccgtcactgcgtcttttactggctcttctcgctaaccaaaccggtaaccccgcttattaaaagcattctgtaacaaagcgggaccaaagccatgacaaaaacgcgtaacaaaagtgtctataatcacggcagaaaagtccacattgattatttgcacggcgtcacactttgctatgccatagcatttttatccataagattagcggatcctacctgacgctttttatcgcaactctctactgtttctccatacccgtttttttgggctagcgaattcgagctcggtacccggggatgtgaactgccgtataggcagccaagattggcgatgagcgaacgcgtaacgcgaatggtgcattttctgccgtaaaggcagatattatttgcgagagtagggaactgccaggcatcaaataaaacgaaaggctcagtcgaaagactgggcctttcgttttatctgttgtttgtcggtgaacgctctcctgagtaggacaaatccgccgggagcggatttgaacgttgcgaagcaacggcccggagggtggcgggcaggacgcccgccataaactgccaggcatcaaattaagcagaaggccatcctgacggatggcctttttgcgtttctacaaactcttttgtttatttttctaaatacattcaaatatgtatccgctcatgagacaataaccctgataaatgcttcaataatattgaaaaaggaagagtatgagtattcaacatttccgtgtcgcccttattcccttttttgcggcattttgccttcctgtttttgctcacccagaaacgctggtgaaagtaaaagatgctgaagatcagttggggcaaactattaactggcgaactacttactctagcttcccggcaacaattaatagactggatggaggcggataaagttgcaggaccacttctgcgctcggcccttccggctggctggtttattgctgataaatctggagc

SEQ ID NO: 5588 - DNA, 5232 bp, Artificial Sequence
  Description of Artificial Sequence: Synthetic polynucleotide
cggtgagcgtgggactcgcggtatcattgcagcactggggccagatggtaagccctcccgtatcgtagttatctacacgacggggagtcaggcaactatggatgaacgaaatagacagatcgctgagataggtgcctcactgattaagcattggtaactgtcagaccaagtttactcatatatactttagattgatttacgcgccctgtagcggcgcattaagcgcggcgggtgtggtggttacgcgcagcgtgaccgctacacttgccagcgccctagcgcccgctcctttcgctttcttcccttcctttctcgccacgttcgccggctttccccgtcaagctctaaatcgggggctccctttagggttccgatttagtgctttacggcacctcgaccccaaaaaacttgatttgggtgatggttcacgtagtgggccatcgccctgatagacggtttttcgccctttgacgttggagtccacgttctttaatagtggactcttgttccaaacttgaacaacactcaaccctatctcgggctattcttttgatttataagggattttgccgatttcggcctattggttaaaaaatgagctgatttaacaaaaatttaacgcgaattttaacaaaatattaacgtttacaatttaaaaggatctaggtgaagatcctttttgataatctcatgaccaaaatcccttaacgtgagttttcgttccactgagcgtcagaccccgtagaaaagatcaaaggatcttcttgagatcctttttttctgcgcgtaatctgctgcttgcaaacaaaaaaaccaccgctaccagcggtggtttgtttgccggatcaagagctaccaactctttttccgaaggtaactggcttcagcagagcgcagataccaaatactgtccttctagtgtagccgtagttaggccaccacttcaagaactctgtagcaccgcctacatacctcgctctgctaatcctgttaccagtcaggcatttgagaagcacacggtcacactgcttccggtagtcaataaaccggtaaaccagcaatagacataagcggctatttaacgaccctgccctgaaccgacgaccgggtcgaatttgctttcgaatttctgccattcatccgcttattatcacttattcaggcgtagcaccaggcgtttaagggcaccaataactgccttaaaaaaattacgccccgccctgccactcatcgcagtactgttgtaattcattaagcattctgccgacatggaagccatcacagacggcatgatgaacctgaatcgccagcggcatcagcaccttgtcgccttgcgtataatatttgcccatggtgaaaacgggggcgaagaagttgtccatattggccacgtttaaatcaaaactggtgaaactcacccagggattggctgagacgaaaaacatattctcaataaaccctttagggaaataggccaggttttcaccgtaacacgccacatcttgcgaatatatgtgtagaaactgccggaaatcgtcgtggtattcactccagagcgatgaaaacgtttcagtttgctcatggaaaacggtgtaacaagggtgaacactatcccatatcaccagctcaccgtctttcattgccatacggaattccggatgagcattcatcaggcgggcaagaatgtgaataaaggccggataaaacttgtgcttatttttctttacggtctttaaaaaggccgtaatatccagctgaacggtctggttataggtacattgagcaactgactgaaatgcctcaaaatgttctttacgatgccattgggatatatcaacggtggtatatccagtgatttttttctccattttagcttccttagctcctgaaaatctcgataactcaaaaaatacgcccggtagtgatcttatttcattatggtgaaagttggaacctcttacgtgccgatcaacgtctcattttcgccaaaagttggcccagggcttcccggtatcaacagggacaccaggatttatttattctgcgaagtgatcttccgtcacaggtatttattcggcgcaaagtgcgtcgggtgatgctgccaacttactgatttagtgtatgatggtgtttttgaggtgctccagtggcttctgtttctatcagctgtccctcctgttcagctactgacggggtggtgcgtaacggcaaaagcaccgccggacatcagcgctagcggagtgtatactggcttactatgttggcactgatgagggtgtcagtgaagtgcttcatgtggcaggagaaaaaaggctgcaccggtgcgtcagcagaatatgtgatacaggatatattccgcttcctcgctcactgactcgctacgctcggtcgttcgactgcggcgagcggaaatggcttacgaacggggcggagatttcctggaagatgccaggaagatacttaacagggaagtgagagggccgcggcaaagccgtttttccataggctccgcccccctgacaagcatcacgaaatctgacgctcaaatcagtggtggcgaaacccgacaggactataaagataccaggcgtttccccctggcggctccctcgtgcgctctcctgttcctgcctttcggtttaccggtgtcattccgctgttatggccgcgtttgtctcattccacgcctgacactcagttccgggtaggcagttcgctccaagctggactgtatgcacgaaccccccgttcagtccgaccgctgcgccttatccggtaactatcgtcttgagtccaacccggaaagacatgcaaaagcaccactggcagcagccactggtaattgatttagaggagttagtcttgaagtcatgcgccggttaaggctaaactgaaaggacaagttttggtgactgcgctcctccaagccagttacctcggttcaaagagttggtagctcagagaaccttcgaaaaaccgccctgcaaggcggttttttcgttttcagagcaagagattacgcgcagaccaaaacgatctcaagaagatcatcttattaatcagataaaatatttgctcatgagcccgaagtggcgagcccgatcttccccatcggtgatgtcggcgatataggcgccagcaaccgcacctgtggcgccggtgatgccggccacgatgcgtccggcgtagaggatctgctcatgtttgacagcttatcatcgatgcataatgtgcctgtcaaatggacgaagcagggattctgcaaaccctatgctactccgtcaagccgtcaattgtctgattcgttaccaattatgacaacttgacggctacatcattcactttttcttcacaaccggcacggaactcgctcgggctggccccggtgcattttttaaatacccgcgagaaatagagttgatcgtcaaaaccaacattgcgaccgacggtggcgataggcatccgggtggtgctcaaaagcagcttcgcctggctgatacgttggtcctcgcgccagcttaagacgctaatccctaactgctggcggaaaagatgtgacagacgcgacggcgacaagcaaacatgctgtgcgacgctggcgatatcaaaattgctgtctgccaggtgatcgctgatgtactgacaagcctcgcgtacccgattatccatcggtggatggagcgactcgttaatcgcttccatgcgccgcagtaacaattgctcaagcagatttatcgccagcagctccgaatagcgcccttccccttgcccggcgttaatgatttgcccaaacaggtcgctgaaatgcggctggtgcgcttcatccgggcgaaagaaccccgtattggcaaatattgacggccagttaagccattcatgccagtaggcgcgcggacgaaagtaaacccactggtgataccattcgcgagcctccggatgacgaccgtagtgatgaatctctcctggcgggaacagcaaaatatcacccggtcggcaaacaaattctcgtccctgatttttcaccaccccctgaccgcgaatggtgagattgagaatataacctttcattcccagcggtcggtcgataaaaaaatcgagataaccgttggcctcaatcggcgttaaacccgccaccagatgggcattaaacgagtatcccggcagcaggggatcattttgcgcttcagccatacttttcatactcccgccattcagagaagaaaccaattgtccatattgcatcagacattgccgtcactgcgtcttttactggctcttctcgctaaccaaaccggtaaccccgcttattaaaagcattctgtaacaaagcgggaccaaagccatgacaaaaacgcgtaacaaaagtgtctataatcacggcagaaaagtccacattgattatttgcacggcgtcacactttgctatgccatagcatttttatccataagattagcggatcctacctgacgctttttatcgcaactctctactgtttctccatacccgtttttttgggctagcgaattcgagctcggtacccggggatgtgaactgccgtataggcagccaagattcatcgcgtgggcgtattcgcaaaggatcagcgattttctgccgtaaaggcagatattatttgcgagagtagggaactgccaggcatcaaataaaacgaaaggctcagtcgaaagactgggcctttcgttttatctgttgtttgtcggtgaacgctctcctgagtaggacaaatccgccgggagcggatttgaacgttgcgaagcaacggcccggagggtggcgggcaggacgcccgccataaactgccaggcatcaaattaagcagaaggccatcctgacggatggcctttttgcgtttctacaaactcttttgtttatttttctaaatacattcaaatatgtatccgctcatgagacaataaccctgataaatgcttcaataatattgaaaaaggaagagtatgagtattcaacatttccgtgtcgcccttattcccttttttgcggcattttgccttcctgtttttgctcacccagaaacgctggtgaaagtaaaagatgctgaagatcagttggggcaaactattaactggcgaactacttactctagcttcccggcaacaattaatagactggatggaggcggataaagttgcaggaccacttctgcgctcggcccttccggctggctggtttattgctgataaatctggagc

SEQ ID NO: 5589 - DNA, 5232 bp, Artificial Sequence
  Description of Artificial Sequence: Synthetic polynucleotide
cggtgagcgtgggactcgcggtatcattgcagcactggggccagatggtaagccctcccgtatcgtagttatctacacgacggggagtcaggcaactatggatgaacgaaatagacagatcgctgagataggtgcctcactgattaagcattggtaactgtcagaccaagtttactcatatatactttagattgatttacgcgccctgtagcggcgcattaagcgcggcgggtgtggtggttacgcgcagcgtgaccgctacacttgccagcgccctagcgcccgctcctttcgctttcttcccttcctttctcgccacgttcgccggctttccccgtcaagctctaaatcgggggctccctttagggttccgatttagtgctttacggcacctcgaccccaaaaaacttgatttgggtgatggttcacgtagtgggccatcgccctgatagacggtttttcgccctttgacgttggagtccacgttctttaatagtggactcttgttccaaacttgaacaacactcaaccctatctcgggctattcttttgatttataagggattttgccgatttcggcctattggttaaaaaatgagctgatttaacaaaaatttaacgcgaattttaacaaaatattaacgtttacaatttaaaaggatctaggtgaagatcctttttgataatctcatgaccaaaatcccttaacgtgagttttcgttccactgagcgtcagaccccgtagaaaagatcaaaggatcttcttgagatcctttttttctgcgcgtaatctgctgcttgcaaacaaaaaaaccaccgctaccagcggtggtttgtttgccggatcaagagctaccaactctttttccgaaggtaactggcttcagcagagcgcagataccaaatactgtccttctagtgtagccgtagttaggccaccacttcaagaactctgtagcaccgcctacatacctcgctctgctaatcctgttaccagtcaggcatttgagaagcacacggtcacactgcttccggtagtcaataaaccggtaaaccagcaatagacataagcggctatttaacgaccctgccctgaaccgacgaccgggtcgaatttgctttcgaatttctgccattcatccgcttattatcacttattcaggcgtagcaccaggcgtttaagggcaccaataactgccttaaaaaaattacgccccgccctgccactcatcgcagtactgttgtaattcattaagcattctgccgacatggaagccatcacagacggcatgatgaacctgaatcgccagcggcatcagcaccttgtcgccttgcgtataatatttgcccatggtgaaaacgggggcgaagaagttgtccatattggccacgtttaaatcaaaactggtgaaactcacccagggattggctgagacgaaaaacatattctcaataaaccctttagggaaataggccaggttttcaccgtaacacgccacatcttgcgaatatatgtgtagaaactgccggaaatcgtcgtggtattcactccagagcgatgaaaacgtttcagtttgctcatggaaaacggtgtaacaagggtgaacactatcccatatcaccagctcaccgtctttcattgccatacggaattccggatgagcattcatcaggcgggcaagaatgtgaataaaggccggataaaacttgtgcttatttttctttacggtctttaaaaaggccgtaatatccagctgaacggtctggttataggtacattgagcaactgactgaaatgcctcaaaatgttctttacgatgccattgggatatatcaacggtggtatatccagtgatttttttctccattttagcttccttagctcctgaaaatctcgataactcaaaaaatacgcccggtagtgatcttatttcattatggtgaaagttggaacctcttacgtgccgatcaacgtctcattttcgccaaaagttggcccagggcttcccggtatcaacagggacaccaggatttatttattctgcgaagtgatcttccgtcacaggtatttattcggcgcaaagtgcgtcgggtgatgctgccaacttactgatttagtgtatgatggtgtttttgaggtgctccagtggcttctgtttctatcagctgtccctcctgttcagctactgacggggtggtgcgtaacggcaaaagcaccgccggacatcagcgctagcggagtgtatactggcttactatgttggcactgatgagggtgtcagtgaagtgcttcatgtggcaggagaaaaaaggctgcaccggtgcgtcagcagaatatgtgatacaggatatattccgcttcctcgctcactgactcgctacgctcggtcgttcgactgcggcgagcggaaatggcttacgaacggggcggagatttcctggaagatgccaggaagatacttaacagggaagtgagagggccgcggcaaagccgtttttccataggctccgcccccctgacaagcatcacgaaatctgacgctcaaatcagtggtggcgaaacccgacaggactataaagataccaggcgtttccccctggcggctccctcgtgcgctctcctgttcctgcctttcggtttaccggtgtcattccgctgttatggccgcgtttgtctcattccacgcctgacactcagttccgggtaggcagttcgctccaagctggactgtatgcacgaaccccccgttcagtccgaccgctgcgccttatccggtaactatcgtcttgagtccaacccggaaagacatgcaaaagcaccactggcagcagccactggtaattgatttagaggagttagtcttgaagtcatgcgccggttaaggctaaactgaaaggacaagttttggtgactgcgctcctccaagccagttacctcggttcaaagagttggtagctcagagaaccttcgaaaaaccgccctgcaaggcggttttttcgttttcagagcaagagattacgcgcagaccaaaacgatctcaagaagatcatcttattaatcagataaaatatttgctcatgagcccgaagtggcgagcccgatcttccccatcggtgatgtcggcgatataggcgccagcaaccgcacctgtggcgccggtgatgccggccacgatgcgtccggcgtagaggatctgctcatgtttgacagcttatcatcgatgcataatgtgcctgtcaaatggacgaagcagggattctgcaaaccctatgctactccgtcaagccgtcaattgtctgattcgttaccaattatgacaacttgacggctacatcattcactttttcttcacaaccggcacggaactcgctcgggctggccccggtgcattttttaaatacccgcgagaaatagagttgatcgtcaaaaccaacattgcgaccgacggtggcgataggcatccgggtggtgctcaaaagcagcttcgcctggctgatacgttggtcctcgcgccagcttaagacgctaatccctaactgctggcggaaaagatgtgacagacgcgacggcgacaagcaaacatgctgtgcgacgctggcgatatcaaaattgctgtctgccaggtgatcgctgatgtactgacaagcctcgcgtacccgattatccatcggtggatggagcgactcgttaatcgcttccatgcgccgcagtaacaattgctcaagcagatttatcgccagcagctccgaatagcgcccttccccttgcccggcgttaatgatttgcccaaacaggtcgctgaaatgcggctggtgcgcttcatccgggcgaaagaaccccgtattggcaaatattgacggccagttaagccattcatgccagtaggcgcgcggacgaaagtaaacccactggtgataccattcgcgagcctccggatgacgaccgtagtgatgaatctctcctggcgggaacagcaaaatatcacccggtcggcaaacaaattctcgtccctgatttttcaccaccccctgaccgcgaatggtgagattgagaatataacctttcattcccagcggtcggtcgataaaaaaatcgagataaccgttggcctcaatcggcgttaaacccgccaccagatgggcattaaacgagtatcccggcagcaggggatcattttgcgcttcagccatacttttcatactcccgccattcagagaagaaaccaattgtccatattgcatcagacattgccgtcactgcgtcttttactggctcttctcgctaaccaaaccggtaaccccgcttattaaaagcattctgtaacaaagcgggaccaaagccatgacaaaaacgcgtaacaaaagtgtctataatcacggcagaaaagtccacattgattatttgcacggcgtcacactttgctatgccatagcatttttatccataagattagcggatcctacctgacgctttttatcgcaactctctactgtttctccatacccgtttttttgggctagcgaattcgagctcggtacccggggatgtgaactgccgtataggcagccaagattctgccactcacaccattcaggcgcctggccgcattttctgccgtaaaggcagatattatttgcgagagtagggaactgccaggcatcaaataaaacgaaaggctcagtcgaaagactgggcctttcgttttatctgttgtttgtcggtgaacgctctcctgagtaggacaaatccgccgggagcggatttgaacgttgcgaagcaacggcccggagggtggcgggcaggacgcccgccataaactgccaggcatcaaattaagcagaaggccatcctgacggatggcctttttgcgtttctacaaactcttttgtttatttttctaaatacattcaaatatgtatccgctcatgagacaataaccctgataaatgcttcaataatattgaaaaaggaagagtatgagtattcaacatttccgtgtcgcccttattcccttttttgcggcattttgccttcctgtttttgctcacccagaaacgctggtgaaagtaaaagatgctgaagatcagttggggcaaactattaactggcgaactacttactctagcttcccggcaacaattaatagactggatggaggcggataaagttgcaggaccacttctgcgctcggcccttccggctggctggtttattgctgataaatctggagc

SEQ ID NO: 5590 - DNA, 5232 bp, Artificial Sequence
  Description of Artificial Sequence: Synthetic polynucleotide
cggtgagcgtgggactcgcggtatcattgcagcactggggccagatggtaagccctcccgtatcgtagttatctacacgacggggagtcaggcaactatggatgaacgaaatagacagatcgctgagataggtgcctcactgattaagcattggtaactgtcagaccaagtttactcatatatactttagattgatttacgcgccctgtagcggcgcattaagcgcggcgggtgtggtggttacgcgcagcgtgaccgctacacttgccagcgccctagcgcccgctcctttcgctttcttcccttcctttctcgccacgttcgccggctttccccgtcaagctctaaatcgggggctccctttagggttccgatttagtgctttacggcacctcgaccccaaaaaacttgatttgggtgatggttcacgtagtgggccatcgccctgatagacggtttttcgccctttgacgttggagtccacgttctttaatagtggactcttgttccaaacttgaacaacactcaaccctatctcgggctattcttttgatttataagggattttgccgatttcggcctattggttaaaaaatgagctgatttaacaaaaatttaacgcgaattttaacaaaatattaacgtttacaatttaaaaggatctaggtgaagatcctttttgataatctcatgaccaaaatcccttaacgtgagttttcgttccactgagcgtcagaccccgtagaaaagatcaaaggatcttcttgagatcctttttttctgcgcgtaatctgctgcttgcaaacaaaaaaaccaccgctaccagcggtggtttgtttgccggatcaagagctaccaactctttttccgaaggtaactggcttcagcagagcgcagataccaaatactgtccttctagtgtagccgtagttaggccaccacttcaagaactctgtagcaccgcctacatacctcgctctgctaatcctgttaccagtcaggcatttgagaagcacacggtcacactgcttccggtagtcaataaaccggtaaaccagcaatagacataagcggctatttaacgaccctgccctgaaccgacgaccgggtcgaatttgctttcgaatttctgccattcatccgcttattatcacttattcaggcgtagcaccaggcgtttaagggcaccaataactgccttaaaaaaattacgccccgccctgccactcatcgcagtactgttgtaattcattaagcattctgccgacatggaagccatcacagacggcatgatgaacctgaatcgccagcggcatcagcaccttgtcgccttgcgtataatatttgcccatggtgaaaacgggggcgaagaagttgtccatattggccacgtttaaatcaaaactggtgaaactcacccagggattggctgagacgaaaaacatattctcaataaaccctttagggaaataggccaggttttcaccgtaacacgccacatcttgcgaatatatgtgtagaaactgccggaaatcgtcgtggtattcactccagagcgatgaaaacgtttcagtttgctcatggaaaacggtgtaacaagggtgaacactatcccatatcaccagctcaccgtctttcattgccatacggaattccggatgagcattcatcaggcgggcaagaatgtgaataaaggccggataaaacttgtgcttatttttctttacggtctttaaaaaggccgtaatatccagctgaacggtctggttataggtacattgagcaactgactgaaatgcctcaaaatgttctttacgatgccattgggatatatcaacggtggtatatccagtgatttttttctccattttagcttccttagctcctgaaaatctcgataactcaaaaaatacgcccggtagtgatcttatttcattatggtgaaagttggaacctcttacgtgccgatcaacgtctcattttcgccaaaagttggcccagggcttcccggtatcaacagggacaccaggatttatttattctgcgaagtgatcttccgtcacaggtatttattcggcgcaaagtgcgtcgggtgatgctgccaacttactgatttagtgtatgatggtgtttttgaggtgctccagtggcttctgtttctatcagctgtccctcctgttcagctactgacggggtggtgcgtaacggcaaaagcaccgccggacatcagcgctagcggagtgtatactggcttactatgttggcactgatgagggtgtcagtgaagtgcttcatgtggcaggagaaaaaaggctgcaccggtgcgtcagcagaatatgtgatacaggatatattccgcttcctcgctcactgactcgctacgctcggtcgttcgactgcggcgagcggaaatggcttacgaacggggcggagatttcctggaagatgccaggaagatacttaacagggaagtgagagggccgcggcaaagccgtttttccataggctccgcccccctgacaagcatcacgaaatctgacgctcaaatcagtggtggcgaaacccgacaggactataaagataccaggcgtttccccctggcggctccctcgtgcgctctcctgttcctgcctttcggtttaccggtgtcattccgctgttatggccgcgtttgtctcattccacgcctgacactcagttccgggtaggcagttcgctccaagctggactgtatgcacgaaccccccgttcagtccgaccgctgcgccttatccggtaactatcgtcttgagtccaacccggaaagacatgcaaaagcaccactggcagcagccactggtaattgatttagaggagttagtcttgaagtcatgcgccggttaaggctaaactgaaaggacaagttttggtgactgcgctcctccaagccagttacctcggttcaaagagttggtagctcagagaaccttcgaaaaaccgccctgcaaggcggttttttcgttttcagagcaagagattacgcgcagaccaaaacgatctcaagaagatcatcttattaatcagataaaatatttgctcatgagcccgaagtggcgagcccgatcttccccatcggtgatgtcggcgatataggcgccagcaaccgcacctgtggcgccggtgatgccggccacgatgcgtccggcgtagaggatctgctcatgtttgacagcttatcatcgatgcataatgtgcctgtcaaatggacgaagcagggattctgcaaaccctatgctactccgtcaagccgtcaattgtctgattcgttaccaattatgacaacttgacggctacatcattcactttttcttcacaaccggcacggaactcgctcgggctggccccggtgcattttttaaatacccgcgagaaatagagttgatcgtcaaaaccaacattgcgaccgacggtggcgataggcatccgggtggtgctcaaaagcagcttcgcctggctgatacgttggtcctcgcgccagcttaagacgctaatccctaactgctggcggaaaagatgtgacagacgcgacggcgacaagcaaacatgctgtgcgacgctggcgatatcaaaattgctgtctgccaggtgatcgctgatgtactgacaagcctcgcgtacccgattatccatcggtggatggagcgactcgttaatcgcttccatgcgccgcagtaacaattgctcaagcagatttatcgccagcagctccgaatagcgcccttccccttgcccggcgttaatgatttgcccaaacaggtcgctgaaatgcggctggtgcgcttcatccgggcgaaagaaccccgtattggcaaatattgacggccagttaagccattcatgccagtaggcgcgcggacgaaagtaaacccactggtgataccattcgcgagcctccggatgacgaccgtagtgatgaatctctcctggcgggaacagcaaaatatcacccggtcggcaaacaaattctcgtccctgatttttcaccaccccctgaccgcgaatggtgagattgagaatataacctttcattcccagcggtcggtcgataaaaaaatcgagataaccgttggcctcaatcggcgttaaacccgccaccagatgggcattaaacgagtatcccggcagcaggggatcattttgcgcttcagccatacttttcatactcccgccattcagagaagaaaccaattgtccatattgcatcagacattgccgtcactgcgtcttttactggctcttctcgctaaccaaaccggtaaccccgcttattaaaagcattctgtaacaaagcgggaccaaagccatgacaaaaacgcgtaacaaaagtgtctataatcacggcagaaaagtccacattgattatttgcacggcgtcacactttgctatgccatagcatttttatccataagattagcggatcctacctgacgctttttatcgcaactctctactgtttctccatacccgtttttttgggctagcgaattcgagctcggtacccggggatgtgaactgccgtataggcagccaagattagagtgtcaatttgcggcacggtgatttcgaaattttctgccgtaaaggcagatattatttgcgagagtagggaactgccaggcatcaaataaaacgaaaggctcagtcgaaagactgggcctttcgttttatctgttgtttgtcggtgaacgctctcctgagtaggacaaatccgccgggagcggatttgaacgttgcgaagcaacggcccggagggtggcgggcaggacgcccgccataaactgccaggcatcaaattaagcagaaggccatcctgacggatggcctttttgcgtttctacaaactcttttgtttatttttctaaatacattcaaatatgtatccgctcatgagacaataaccctgataaatgcttcaataatattgaaaaaggaagagtatgagtattcaacatttccgtgtcgcccttattcccttttttgcggcattttgccttcctgtttttgctcacccagaaacgctggtgaaagtaaaagatgctgaagatcagttggggcaaactattaactggcgaactacttactctagcttcccggcaacaattaatagactggatggaggcggataaagttgcaggaccacttctgcgctcggcccttccggctggctggtttattgctgataaatctggagc

SEQ ID NO: 5591 - DNA, 5232 bp, Artificial Sequence
  Description of Artificial Sequence: Synthetic polynucleotide
cggtgagcgtgggactcgcggtatcattgcagcactggggccagatggtaagccctcccgtatcgtagttatctacacgacggggagtcaggcaactatggatgaacgaaatagacagatcgctgagataggtgcctcactgattaagcattggtaactgtcagaccaagtttactcatatatactttagattgatttacgcgccctgtagcggcgcattaagcgcggcgggtgtggtggttacgcgcagcgtgaccgctacacttgccagcgccctagcgcccgctcctttcgctttcttcccttcctttctcgccacgttcgccggctttccccgtcaagctctaaatcgggggctccctttagggttccgatttagtgctttacggcacctcgaccccaaaaaacttgatttgggtgatggttcacgtagtgggccatcgccctgatagacggtttttcgccctttgacgttggagtccacgttctttaatagtggactcttgttccaaacttgaacaacactcaaccctatctcgggctattcttttgatttataagggattttgccgatttcggcctattggttaaaaaatgagctgatttaacaaaaatttaacgcgaattttaacaaaatattaacgtttacaatttaaaaggatctaggtgaagatcctttttgataatctcatgaccaaaatcccttaacgtgagttttcgttccactgagcgtcagaccccgtagaaaagatcaaaggatcttcttgagatcctttttttctgcgcgtaatctgctgcttgcaaacaaaaaaaccaccgctaccagcggtggtttgtttgccggatcaagagctaccaactctttttccgaaggtaactggcttcagcagagcgcagataccaaatactgtccttctagtgtagccgtagttaggccaccacttcaagaactctgtagcaccgcctacatacctcgctctgctaatcctgttaccagtcaggcatttgagaagcacacggtcacactgcttccggtagtcaataaaccggtaaaccagcaatagacataagcggctatttaacgaccctgccctgaaccgacgaccgggtcgaatttgctttcgaatttctgccattcatccgcttattatcacttattcaggcgtagcaccaggcgtttaagggcaccaataactgccttaaaaaaattacgccccgccctgccactcatcgcagtactgttgtaattcattaagcattctgccgacatggaagccatcacagacggcatgatgaacctgaatcgccagcggcatcagcaccttgtcgccttgcgtataatatttgcccatggtgaaaacgggggcgaagaagttgtccatattggccacgtttaaatcaaaactggtgaaactcacccagggattggctgagacgaaaaacatattctcaataaaccctttagggaaataggccaggttttcaccgtaacacgccacatcttgcgaatatatgtgtagaaactgccggaaatcgtcgtggtattcactccagagcgatgaaaacgtttcagtttgctcatggaaaacggtgtaacaagggtgaacactatcccatatcaccagctcaccgtctttcattgccatacggaattccggatgagcattcatcaggcgggcaagaatgtgaataaaggccggataaaacttgtgcttatttttctttacggtctttaaaaaggccgtaatatccagctgaacggtctggttataggtacattgagcaactgactgaaatgcctcaaaatgttctttacgatgccattgggatatatcaacggtggtatatccagtgatttttttctccattttagcttccttagctcctgaaaatctcgataactcaaaaaatacgcccggtagtgatcttatttcattatggtgaaagttggaacctcttacgtgccgatcaacgtctcattttcgccaaaagttggcccagggcttcccggtatcaacagggacaccaggatttatttattctgcgaagtgatcttccgtcacaggtatttattcggcgcaaagtgcgtcgggtgatgctgccaacttactgatttagtgtatgatggtgtttttgaggtgctccagtggcttctgtttctatcagctgtccctcctgttcagctactgacggggtggtgcgtaacggcaaaagcaccgccggacatcagcgctagcggagtgtatactggcttactatgttggcactgatgagggtgtcagtgaagtgcttcatgtggcaggagaaaaaaggctgcaccggtgcgtcagcagaatatgtgatacaggatatattccgcttcctcgctcactgactcgctacgctcggtcgttcgactgcggcgagcggaaatggcttacgaacggggcggagatttcctggaagatgccaggaagatacttaacagggaagtgagagggccgcggcaaagccgtttttccataggctccgcccccctgacaagcatcacgaaatctgacgctcaaatcagtggtggcgaaacccgacaggactataaagataccaggcgtttccccctggcggctccctcgtgcgctctcctgttcctgcctttcggtttaccggtgtcattccgctgttatggccgcgtttgtctcattccacgcctgacactcagttccgggtaggcagttcgctccaagctggactgtatgcacgaaccccccgttcagtccgaccgctgcgccttatccggtaactatcgtcttgagtccaacccggaaagacatgcaaaagcaccactggcagcagccactggtaattgatttagaggagttagtcttgaagtcatgcgccggttaaggctaaactgaaaggacaagttttggtgactgcgctcctccaagccagttacctcggttcaaagagttggtagctcagagaaccttcgaaaaaccgccctgcaaggcggttttttcgttttcagagcaagagattacgcgcagaccaaaacgatctcaagaagatcatcttattaatcagataaaatatttgctcatgagcccgaagtggcgagcccgatcttccccatcggtgatgtcggcgatataggcgccagcaaccgcacctgtggcgccggtgatgccggccacgatgcgtccggcgtagaggatctgctcatgtttgacagcttatcatcgatgcataatgtgcctgtcaaatggacgaagcagggattctgcaaaccctatgctactccgtcaagccgtcaattgtctgattcgttaccaattatgacaacttgacggctacatcattcactttttcttcacaaccggcacggaactcgctcgggctggccccggtgcattttttaaatacccgcgagaaatagagttgatcgtcaaaaccaacattgcgaccgacggtggcgataggcatccgggtggtgctcaaaagcagcttcgcctggctgatacgttggtcctcgcgccagcttaagacgctaatccctaactgctggcggaaaagatgtgacagacgcgacggcgacaagcaaacatgctgtgcgacgctggcgatatcaaaattgctgtctgccaggtgatcgctgatgtactgacaagcctcgcgtacccgattatccatcggtggatggagcgactcgttaatcgcttccatgcgccgcagtaacaattgctcaagcagatttatcgccagcagctccgaatagcgcccttccccttgcccggcgttaatgatttgcccaaacaggtcgctgaaatgcggctggtgcgcttcatccgggcgaaagaaccccgtattggcaaatattgacggccagttaagccattcatgccagtaggcgcgcggacgaaagtaaacccactggtgataccattcgcgagcctccggatgacgaccgtagtgatgaatctctcctggcgggaacagcaaaatatcacccggtcggcaaacaaattctcgtccctgatttttcaccaccccctgaccgcgaatggtgagattgagaatataacctttcattcccagcggtcggtcgataaaaaaatcgagataaccgttggcctcaatcggcgttaaacccgccaccagatgggcattaaacgagtatcccggcagcaggggatcattttgcgcttcagccatacttttcatactcccgccattcagagaagaaaccaattgtccatattgcatcagacattgccgtcactgcgtcttttactggctcttctcgctaaccaaaccggtaaccccgcttattaaaagcattctgtaacaaagcgggaccaaagccatgacaaaaacgcgtaacaaaagtgtctataatcacggcagaaaagtccacattgattatttgcacggcgtcacactttgctatgccatagcatttttatccataagattagcggatcctacctgacgctttttatcgcaactctctactgtttctccatacccgtttttttgggctagcgaattcgagctcggtacccggggatgtgaactgccgtataggcagccaagatttgtgccacggtctggctgccgaggggtatcgcattttctgccgtaaaggcagatattatttgcgagagtagggaactgccaggcatcaaataaaacgaaaggctcagtcgaaagactgggcctttcgttttatctgttgtttgtcggtgaacgctctcctgagtaggacaaatccgccgggagcggatttgaacgttgcgaagcaacggcccggagggtggcgggcaggacgcccgccataaactgccaggcatcaaattaagcagaaggccatcctgacggatggcctttttgcgtttctacaaactcttttgtttatttttctaaatacattcaaatatgtatccgctcatgagacaataaccctgataaatgcttcaataatattgaaaaaggaagagtatgagtattcaacatttccgtgtcgcccttattcccttttttgcggcattttgccttcctgtttttgctcacccagaaacgctggtgaaagtaaaagatgctgaagatcagttggggcaaactattaactggcgaactacttactctagcttcccggcaacaattaatagactggatggaggcggataaagttgcaggaccacttctgcgctcggcccttccggctggctggtttattgctgataaatctggagc

SEQ ID NO: 5592 - DNA, 5352 bp, Artificial Sequence
  Description of Artificial Sequence: Synthetic polynucleotide
tctccatacccgtttttttgggctagcgaattcgagctcggtacccggggatcctctagagtcgacctgcaggcatgcaagcttggctgttttggcggatgagagaagattttcagcctgatacagattaaatcagaacgcagaagcggtctgataaaacagaatttgcctggcggcagtagcgcggtggtcccacctgaccccatgccgaactcagaagtgaaacgccgtagcgccgatggtagtgtggggtctccccatgcgagagtagggaactgccaggcatcaaataaaacgaaaggctcagtcgaaagactgggcctttcgttttatctgttgtttgtcggtgaacgctctcctgagtaggacaaatccgccgggagcggatttgaacgttgcgaagcaacggcccggagggtggcgggcaggacgcccgccataaactgccaggcatcaaattaagcagaaggccatcctgacggatggcctttttgcgtttctacaaactcttttgtttatttttctaaatacattcaaatatgtatccgctcatgagacaataaccctgataaatgcttcaataatattgaaaaaggaagagtatgagtattcaacatttccgtgtcgcccttattcccttttttgcggcattttgccttcctgtttttgctcacccagaaacgctggtgaaagtaaaagatgctgaagatcagttggggcaaactattaactggcgaactacttactctagcttcccggcaacaattaatagactggatggaggcggataaagttgcaggaccacttctgcgctcggcccttccggctggctggtttattgctgataaatctggagccggtgagcgtgggactcgcggtatcattgcagcactggggccagatggtaagccctcccgtatcgtagttatctacacgacggggagtcaggcaactatggatgaacgaaatagacagatcgctgagataggtgcctcactgattaagcattggtaactgtcagaccaagtttactcatatatactttagattgatttacgcgccctgtagcggcgcattaagcgcggcgggtgtggtggttacgcgcagcgtgaccgctacacttgccagcgccctagcgcccgctcctttcgctttcttcccttcctttctcgccacgttcgccggctttccccgtcaagctctaaatcgggggctccctttagggttccgatttagtgctttacggcacctcgaccccaaaaaacttgatttgggtgatggttcacgtagtgggccatcgccctgatagacggtttttcgccctttgacgttggagtccacgttctttaatagtggactcttgttccaaacttgaacaacactcaaccctatctcgggctattcttttgatttataagggattttgccgatttcggcctattggttaaaaaatgagctgatttaacaaaaatttaacgcgaattttaacaaaatattaacgtttacaatttaaaaggatctaggtgaagatcctttttgataatctcatgaccaaaatcccttaacgtgagttttcgttccactgagcgtcagaccccgtagaaaagatcaaaggatcttcttgagatcctttttttctgcgcgtaatctgctgcttgcaaacaaaaaaaccaccgctaccagcggtggtttgtttgccggatcaagagctaccaactctttttccgaaggtaactggcttcagcagagcgcagataccaaatactgtccttctagtgtagccgtagttaggccaccacttcaagaactctgtagcaccgcctacatacctcgctctgctaatcctgttaccagtcaggcatttgagaagcacacggtcacactgcttccggtagtcaataaaccggtaaaccagcaatagacataagcggctatttaacgaccctgccctgaaccgacgaccgggtcgaatttgctttcgaatttctgccattcatccgcttattatcacttattcaggcgtagcaccaggcgtttaagggcaccaataactgccttaaaaaaattacgccccgccctgccactcatcgcagtactgttgtaattcattaagcattctgccgacatggaagccatcacagacggcatgatgaacctgaatcgccagcggcatcagcaccttgtcgccttgcgtataatatttgcccatggtgaaaacgggggcgaagaagttgtccatattggccacgtttaaatcaaaactggtgaaactcacccagggattggctgagacgaaaaacatattctcaataaaccctttagggaaataggccaggttttcaccgtaacacgccacatcttgcgaatatatgtgtagaaactgccggaaatcgtcgtggtattcactccagagcgatgaaaacgtttcagtttgctcatggaaaacggtgtaacaagggtgaacactatcccatatcaccagctcaccgtctttcattgccatacggaattccggatgagcattcatcaggcgggcaagaatgtgaataaaggccggataaaacttgtgcttatttttctttacggtctttaaaaaggccgtaatatccagctgaacggtctggttataggtacattgagcaactgactgaaatgcctcaaaatgttctttacgatgccattgggatatatcaacggtggtatatccagtgatttttttctccattttagcttccttagctcctgaaaatctcgataactcaaaaaatacgcccggtagtgatcttatttcattatggtgaaagttggaacctcttacgtgccgatcaacgtctcattttcgccaaaagttggcccagggcttcccggtatcaacagggacaccaggatttatttattctgcgaagtgatcttccgtcacaggtatttattcggcgcaaagtgcgtcgggtgatgctgccaacttactgatttagtgtatgatggtgtttttgaggtgctccagtggcttctgtttctatcagctgtccctcctgttcagctactgacggggtggtgcgtaacggcaaaagcaccgccggacatcagcgctagcggagtgtatactggcttactatgttggcactgatgagggtgtcagtgaagtgcttcatgtggcaggagaaaaaaggctgcaccggtgcgtcagcagaatatgtgatacaggatatattccgcttcctcgctcactgactcgctacgctcggtcgttcgactgcggcgagcggaaatggcttacgaacggggcggagatttcctggaagatgccaggaagatacttaacagggaagtgagagggccgcggcaaagccgtttttccataggctccgcccccctgacaagcatcacgaaatctgacgctcaaatcagtggtggcgaaacccgacaggactataaagataccaggcgtttccccctggcggctccctcgtgcgctctcctgttcctgcctttcggtttaccggtgtcattccgctgttatggccgcgtttgtctcattccacgcctgacactcagttccgggtaggcagttcgctccaagctggactgtatgcacgaaccccccgttcagtccgaccgctgcgccttatccggtaactatcgtcttgagtccaacccggaaagacatgcaaaagcaccactggcagcagccactggtaattgatttagaggagttagtcttgaagtcatgcgccggttaaggctaaactgaaaggacaagttttggtgactgcgctcctccaagccagttacctcggttcaaagagttggtagctcagagaaccttcgaaaaaccgccctgcaaggcggttttttcgttttcagagcaagagattacgcgcagaccaaaacgatctcaagaagatcatcttattaatcagataaaatatttgctcatgagcccgaagtggcgagcccgatcttccccatcggtgatgtcggcgatataggcgccagcaaccgcacctgtggcgccggtgatgccggccacgatgcgtccggcgtagaggatctgctcatgtttgacagcttatcatcgatgcataatgtgcctgtcaaatggacgaagcagggattctgcaaaccctatgctactccgtcaagccgtcaattgtctgattcgttaccaattatgacaacttgacggctacatcattcactttttcttcacaaccggcacggaactcgctcgggctggccccggtgcattttttaaatacccgcgagaaatagagttgatcgtcaaaaccaacattgcgaccgacggtggcgataggcatccgggtggtgctcaaaagcagcttcgcctggctgatacgttggtcctcgcgccagcttaagacgctaatccctaactgctggcggaaaagatgtgacagacgcgacggcgacaagcaaacatgctgtgcgacgctggcgatatcaaaattgctgtctgccaggtgatcgctgatgtactgacaagcctcgcgtacccgattatccatcggtggatggagcgactcgttaatcgcttccatgcgccgcagtaacaattgctcaagcagatttatcgccagcagctccgaatagcgcccttccccttgcccggcgttaatgatttgcccaaacaggtcgctgaaatgcggctggtgcgcttcatccgggcgaaagaaccccgtattggcaaatattgacggccagttaagccattcatgccagtaggcgcgcggacgaaagtaaacccactggtgataccattcgcgagcctccggatgacgaccgtagtgatgaatctctcctggcgggaacagcaaaatatcacccggtcggcaaacaaattctcgtccctgatttttcaccaccccctgaccgcgaatggtgagattgagaatataacctttcattcccagcggtcggtcgataaaaaaatcgagataaccgttggcctcaatcggcgttaaacccgccaccagatgggcattaaacgagtatcccggcagcaggggatcattttgcgcttcagccatacttttcatactcccgccattcagagaagaaaccaattgtccatattgcatcagacattgccgtcactgcgtcttttactggctcttctcgctaaccaaaccggtaaccccgcttattaaaagcattctgtaacaaagcgggaccaaagccatgacaaaaacgcgtaacaaaagtgtctataatcacggcagaaaagtccacattgattatttgcacggcgtcacactttgctatgccatagcatttttatccataagattagcggatcctacctgacgctttttatcgcaactctctactgtt

SEQ ID NO: 5593 - DNA, 5231 bp, Artificial Sequence
  Description of Artificial Sequence: Synthetic polynucleotide
tctccatacccgtttttttgggctagcgaattcgagctcggtacccgggtgaactgccgtataggcagccaagaaaacagcggatggttcggataatgcgaacagcgcattaactgccgtataggcagacaagattccatgcgagagtagggaactgccaggcatcaaataaaacgaaaggctcagtcgaaagactgggcctttcgttttatctgttgtttgtcggtgaacgctctcctgagtaggacaaatccgccgggagcggatttgaacgttgcgaagcaacggcccggagggtggcgggcaggacgcccgccataaactgccaggcatcaaattaagcagaaggccatcctgacggatggcctttttgcgtttctacaaactcttttgtttatttttctaaatacattcaaatatgtatccgctcatgagacaataaccctgataaatgcttcaataatattgaaaaaggaagagtatgagtattcaacatttccgtgtcgcccttattcccttttttgcggcattttgccttcctgtttttgctcacccagaaacgctggtgaaagtaaaagatgctgaagatcagttggggcaaactattaactggcgaactacttactctagcttcccggcaacaattaatagactggatggaggcggataaagttgcaggaccacttctgcgctcggcccttccggctggctggtttattgctgataaatctggagccggtgagcgtgggactcgcggtatcattgcagcactggggccagatggtaagccctcccgtatcgtagttatctacacgacggggagtcaggcaactatggatgaacgaaatagacagatcgctgagataggtgcctcactgattaagcattggtaactgtcagaccaagtttactcatatatactttagattgatttacgcgccctgtagcggcgcattaagcgcggcgggtgtggtggttacgcgcagcgtgaccgctacacttgccagcgccctagcgcccgctcctttcgctttcttcccttcctttctcgccacgttcgccggctttccccgtcaagctctaaatcgggggctccctttagggttccgatttagtgctttacggcacctcgaccccaaaaaacttgatttgggtgatggttcacgtagtgggccatcgccctgatagacggtttttcgccctttgacgttggagtccacgttctttaatagtggactcttgttccaaacttgaacaacactcaaccctatctcgggctattcttttgatttataagggattttgccgatttcggcctattggttaaaaaatgagctgatttaacaaaaatttaacgcgaattttaacaaaatattaacgtttacaatttaaaaggatctaggtgaagatcctttttgataatctcatgaccaaaatcccttaacgtgagttttcgttccactgagcgtcagaccccgtagaaaagatcaaaggatcttcttgagatcctttttttctgcgcgtaatctgctgcttgcaaacaaaaaaaccaccgctaccagcggtggtttgtttgccggatcaagagctaccaactctttttccgaaggtaactggcttcagcagagcgcagataccaaatactgtccttctagtgtagccgtagttaggccaccacttcaagaactctgtagcaccgcctacatacctcgctctgctaatcctgttaccagtcaggcatttgagaagcacacggtcacactgcttccggtagtcaataaaccggtaaaccagcaatagacataagcggctatttaacgaccctgccctgaaccgacgaccgggtcgaatttgctttcgaatttctgccattcatccgcttattatcacttattcaggcgtagcaccaggcgtttaagggcaccaataactgccttaaaaaaattacgccccgccctgccactcatcgcagtactgttgtaattcattaagcattctgccgacatggaagccatcacagacggcatgatgaacctgaatcgccagcggcatcagcaccttgtcgccttgcgtataatatttgcccatggtgaaaacgggggcgaagaagttgtccatattggccacgtttaaatcaaaactggtgaaactcacccagggattggctgagacgaaaaacatattctcaataaaccctttagggaaataggccaggttttcaccgtaacacgccacatcttgcgaatatatgtgtagaaactgccggaaatcgtcgtggtattcactccagagcgatgaaaacgtttcagtttgctcatggaaaacggtgtaacaagggtgaacactatcccatatcaccagctcaccgtctttcattgccatacggaattccggatgagcattcatcaggcgggcaagaatgtgaataaaggccggataaaacttgtgcttatttttctttacggtctttaaaaaggccgtaatatccagctgaacggtctggttataggtacattgagcaactgactgaaatgcctcaaaatgttctttacgatgccattgggatatatcaacggtggtatatccagtgatttttttctccattttagcttccttagctcctgaaaatctcgataactcaaaaaatacgcccggtagtgatcttatttcattatggtgaaagttggaacctcttacgtgccgatcaacgtctcattttcgccaaaagttggcccagggcttcccggtatcaacagggacaccaggatttatttattctgcgaagtgatcttccgtcacaggtatttattcggcgcaaagtgcgtcgggtgatgctgccaacttactgatttagtgtatgatggtgtttttgaggtgctccagtggcttctgtttctatcagctgtccctcctgttcagctactgacggggtggtgcgtaacggcaaaagcaccgccggacatcagcgctagcggagtgtatactggcttactatgttggcactgatgagggtgtcagtgaagtgcttcatgtggcaggagaaaaaaggctgcaccggtgcgtcagcagaatatgtgatacaggatatattccgcttcctcgctcactgactcgctacgctcggtcgttcgactgcggcgagcggaaatggcttacgaacggggcggagatttcctggaagatgccaggaagatacttaacagggaagtgagagggccgcggcaaagccgtttttccataggctccgcccccctgacaagcatcacgaaatctgacgctcaaatcagtggtggcgaaacccgacaggactataaagataccaggcgtttccccctggcggctccctcgtgcgctctcctgttcctgcctttcggtttaccggtgtcattccgctgttatggccgcgtttgtctcattccacgcctgacactcagttccgggtaggcagttcgctccaagctggactgtatgcacgaaccccccgttcagtccgaccgctgcgccttatccggtaactatcgtcttgagtccaacccggaaagacatgcaaaagcaccactggcagcagccactggtaattgatttagaggagttagtcttgaagtcatgcgccggttaaggctaaactgaaaggacaagttttggtgactgcgctcctccaagccagttacctcggttcaaagagttggtagctcagagaaccttcgaaaaaccgccctgcaaggcggttttttcgttttcagagcaagagattacgcgcagaccaaaacgatctcaagaagatcatcttattaatcagataaaatatttgctcatgagcccgaagtggcgagcccgatcttccccatcggtgatgtcggcgatataggcgccagcaaccgcacctgtggcgccggtgatgccggccacgatgcgtccggcgtagaggatctgctcatgtttgacagcttatcatcgatgcataatgtgcctgtcaaatggacgaagcagggattctgcaaaccctatgctactccgtcaagccgtcaattgtctgattcgttaccaattatgacaacttgacggctacatcattcactttttcttcacaaccggcacggaactcgctcgggctggccccggtgcattttttaaatacccgcgagaaatagagttgatcgtcaaaaccaacattgcgaccgacggtggcgataggcatccgggtggtgctcaaaagcagcttcgcctggctgatacgttggtcctcgcgccagcttaagacgctaatccctaactgctggcggaaaagatgtgacagacgcgacggcgacaagcaaacatgctgtgcgacgctggcgatatcaaaattgctgtctgccaggtgatcgctgatgtactgacaagcctcgcgtacccgattatccatcggtggatggagcgactcgttaatcgcttccatgcgccgcagtaacaattgctcaagcagatttatcgccagcagctccgaatagcgcccttccccttgcccggcgttaatgatttgcccaaacaggtcgctgaaatgcggctggtgcgcttcatccgggcgaaagaaccccgtattggcaaatattgacggccagttaagccattcatgccagtaggcgcgcggacgaaagtaaacccactggtgataccattcgcgagcctccggatgacgaccgtagtgatgaatctctcctggcgggaacagcaaaatatcacccggtcggcaaacaaattctcgtccctgatttttcaccaccccctgaccgcgaatggtgagattgagaatataacctttcattcccagcggtcggtcgataaaaaaatcgagataaccgttggcctcaatcggcgttaaacccgccaccagatgggcattaaacgagtatcccggcagcaggggatcattttgcgcttcagccatacttttcatactcccgccattcagagaagaaaccaattgtccatattgcatcagacattgccgtcactgcgtcttttactggctcttctcgctaaccaaaccggtaaccccgcttattaaaagcattctgtaacaaagcgggaccaaagccatgacaaaaacgcgtaacaaaagtgtctataatcacggcagaaaagtccacattgattatttgcacggcgtcacactttgctatgccatagcatttttatccataagattagcggatcctacctgacgctttttatcgcaactctctactgtt

SEQ ID NO: 5594 - DNA, 5231 bp, Artificial Sequence
  Description of Artificial Sequence: Synthetic polynucleotide
tctccatacccgtttttttgggctagcgaattcgagctcggtacccgggtgaactgccgtataggcagccaagattacagcggatggttcggataatgcgaacagcgcgtgttctgccgtaaaggcagctattattccatgcgagagtagggaactgccaggcatcaaataaaacgaaaggctcagtcgaaagactgggcctttcgttttatctgttgtttgtcggtgaacgctctcctgagtaggacaaatccgccgggagcggatttgaacgttgcgaagcaacggcccggagggtggcgggcaggacgcccgccataaactgccaggcatcaaattaagcagaaggccatcctgacggatggcctttttgcgtttctacaaactcttttgtttatttttctaaatacattcaaatatgtatccgctcatgagacaataaccctgataaatgcttcaataatattgaaaaaggaagagtatgagtattcaacatttccgtgtcgcccttattcccttttttgcggcattttgccttcctgtttttgctcacccagaaacgctggtgaaagtaaaagatgctgaagatcagttggggcaaactattaactggcgaactacttactctagcttcccggcaacaattaatagactggatggaggcggataaagttgcaggaccacttctgcgctcggcccttccggctggctggtttattgctgataaatctggagccggtgagcgtgggactcgcggtatcattgcagcactggggccagatggtaagccctcccgtatcgtagttatctacacgacggggagtcaggcaactatggatgaacgaaatagacagatcgctgagataggtgcctcactgattaagcattggtaactgtcagaccaagtttactcatatatactttagattgatttacgcgccctgtagcggcgcattaagcgcggcgggtgtggtggttacgcgcagcgtgaccgctacacttgccagcgccctagcgcccgctcctttcgctttcttcccttcctttctcgccacgttcgccggctttccccgtcaagctctaaatcgggggctccctttagggttccgatttagtgctttacggcacctcgaccccaaaaaacttgatttgggtgatggttcacgtagtgggccatcgccctgatagacggtttttcgccctttgacgttggagtccacgttctttaatagtggactcttgttccaaacttgaacaacactcaaccctatctcgggctattcttttgatttataagggattttgccgatttcggcctattggttaaaaaatgagctgatttaacaaaaatttaacgcgaattttaacaaaatattaacgtttacaatttaaaaggatctaggtgaagatcctttttgataatctcatgaccaaaatcccttaacgtgagttttcgttccactgagcgtcagaccccgtagaaaagatcaaaggatcttcttgagatcctttttttctgcgcgtaatctgctgcttgcaaacaaaaaaaccaccgctaccagcggtggtttgtttgccggatcaagagctaccaactctttttccgaaggtaactggcttcagcagagcgcagataccaaatactgtccttctagtgtagccgtagttaggccaccacttcaagaactctgtagcaccgcctacatacctcgctctgctaatcctgttaccagtcaggcatttgagaagcacacggtcacactgcttccggtagtcaataaaccggtaaaccagcaatagacataagcggctatttaacgaccctgccctgaaccgacgaccgggtcgaatttgctttcgaatttctgccattcatccgcttattatcacttattcaggcgtagcaccaggcgtttaagggcaccaataactgccttaaaaaaattacgccccgccctgccactcatcgcagtactgttgtaattcattaagcattctgccgacatggaagccatcacagacggcatgatgaacctgaatcgccagcggcatcagcaccttgtcgccttgcgtataatatttgcccatggtgaaaacgggggcgaagaagttgtccatattggccacgtttaaatcaaaactggtgaaactcacccagggattggctgagacgaaaaacatattctcaataaaccctttagggaaataggccaggttttcaccgtaacacgccacatcttgcgaatatatgtgtagaaactgccggaaatcgtcgtggtattcactccagagcgatgaaaacgtttcagtttgctcatggaaaacggtgtaacaagggtgaacactatcccatatcaccagctcaccgtctttcattgccatacggaattccggatgagcattcatcaggcgggcaagaatgtgaataaaggccggataaaacttgtgcttatttttctttacggtctttaaaaaggccgtaatatccagctgaacggtctggttataggtacattgagcaactgactgaaatgcctcaaaatgttctttacgatgccattgggatatatcaacggtggtatatccagtgatttttttctccattttagcttccttagctcctgaaaatctcgataactcaaaaaatacgcccggtagtgatcttatttcattatggtgaaagttggaacctcttacgtgccgatcaacgtctcattttcgccaaaagttggcccagggcttcccggtatcaacagggacaccaggatttatttattctgcgaagtgatcttccgtcacaggtatttattcggcgcaaagtgcgtcgggtgatgctgccaacttactgatttagtgtatgatggtgtttttgaggtgctccagtggcttctgtttctatcagctgtccctcctgttcagctactgacggggtggtgcgtaacggcaaaagcaccgccggacatcagcgctagcggagtgtatactggcttactatgttggcactgatgagggtgtcagtgaagtgcttcatgtggcaggagaaaaaaggctgcaccggtgcgtcagcagaatatgtgatacaggatatattccgcttcctcgctcactgactcgctacgctcggtcgttcgactgcggcgagcggaaatggcttacgaacggggcggagatttcctggaagatgccaggaagatacttaacagggaagtgagagggccgcggcaaagccgtttttccataggctccgcccccctgacaagcatcacgaaatctgacgctcaaatcagtggtggcgaaacccgacaggactataaagataccaggcgtttccccctggcggctccctcgtgcgctctcctgttcctgcctttcggtttaccggtgtcattccgctgttatggccgcgtttgtctcattccacgcctgacactcagttccgggtaggcagttcgctccaagctggactgtatgcacgaaccccccgttcagtccgaccgctgcgccttatccggtaactatcgtcttgagtccaacccggaaagacatgcaaaagcaccactggcagcagccactggtaattgatttagaggagttagtcttgaagtcatgcgccggttaaggctaaactgaaaggacaagttttggtgactgcgctcctccaagccagttacctcggttcaaagagttggtagctcagagaaccttcgaaaaaccgccctgcaaggcggttttttcgttttcagagcaagagattacgcgcagaccaaaacgatctcaagaagatcatcttattaatcagataaaatatttgctcatgagcccgaagtggcgagcccgatcttccccatcggtgatgtcggcgatataggcgccagcaaccgcacctgtggcgccggtgatgccggccacgatgcgtccggcgtagaggatctgctcatgtttgacagcttatcatcgatgcataatgtgcctgtcaaatggacgaagcagggattctgcaaaccctatgctactccgtcaagccgtcaattgtctgattcgttaccaattatgacaacttgacggctacatcattcactttttcttcacaaccggcacggaactcgctcgggctggccccggtgcattttttaaatacccgcgagaaatagagttgatcgtcaaaaccaacattgcgaccgacggtggcgataggcatccgggtggtgctcaaaagcagcttcgcctggctgatacgttggtcctcgcgccagcttaagacgctaatccctaactgctggcggaaaagatgtgacagacgcgacggcgacaagcaaacatgctgtgcgacgctggcgatatcaaaattgctgtctgccaggtgatcgctgatgtactgacaagcctcgcgtacccgattatccatcggtggatggagcgactcgttaatcgcttccatgcgccgcagtaacaattgctcaagcagatttatcgccagcagctccgaatagcgcccttccccttgcccggcgttaatgatttgcccaaacaggtcgctgaaatgcggctggtgcgcttcatccgggcgaaagaaccccgtattggcaaatattgacggccagttaagccattcatgccagtaggcgcgcggacgaaagtaaacccactggtgataccattcgcgagcctccggatgacgaccgtagtgatgaatctctcctggcgggaacagcaaaatatcacccggtcggcaaacaaattctcgtccctgatttttcaccaccccctgaccgcgaatggtgagattgagaatataacctttcattcccagcggtcggtcgataaaaaaatcgagataaccgttggcctcaatcggcgttaaacccgccaccagatgggcattaaacgagtatcccggcagcaggggatcattttgcgcttcagccatacttttcatactcccgccattcagagaagaaaccaattgtccatattgcatcagacattgccgtcactgcgtcttttactggctcttctcgctaaccaaaccggtaaccccgcttattaaaagcattctgtaacaaagcgggaccaaagccatgacaaaaacgcgtaacaaaagtgtctataatcacggcagaaaagtccacattgattatttgcacggcgtcacactttgctatgccatagcatttttatccataagattagcggatcctacctgacgctttttatcgcaactctctactgtt

SEQ ID NO: 5595 - DNA, 3630 bp, Artificial Sequence
  Description of Artificial Sequence: Synthetic polynucleotide
ttgagatcctttttttctgcgcgtaatctgctgcttgcaaacaaaaaaaccaccgctaccagcggtggtttgtttgccggatcaagagctaccaactctttttccgaaggtaactggcttcagcagagcgcagataccaaatactgttcttctagtgtagccgtagttaggccaccacttcaagaactctgtagcaccgcctacatacctcgctctgctaatcctgttaccagtggctgctgccagtggcgataagtcgtgtcttaccgggttggactcaagacgatagttaccggataaggcgcagcggtcgggctgaacggggggttcgtgcacacagcccagcttggagcgaacgacctacaccgaactgagatacctacagcgtgagctatgagaaagcgccacgcttcccgaagggagaaaggcggacaggtatccggtaagcggcagggtcggaacaggagagcgcacgagggagcttccagggggaaacgcctggtatctttatagtcctgtcgggtttcgccacctctgacttgagcgtcgatttttgtgatgctcgtcaggggggcggagcctatggaaaaacgccagcaacgcggcctttttacggttcctggccttttgctggccttttgctcacatgttctttcctgcgttatcccctgattctgtggataaccgtattaccgcctttgagtgagctgataccgctcgccgcagccgaacgaccgagcgcagcgagtcagtgagcgaggaagcggaagagcgcccaatacgcaaaccgcctctccccgcgcgttggccgattcattaatgcagctggcacgacaggtttcccgactggaaagcgggcagtgagcgcaacgcaattaatgtgagttagctcactcattaggcaccccaggctttacactttatgcttccggctcgtatgttgtgtggaattgtgagcggataacaatttcacacaggaaacagctatgaccatgattacgccaagctttgttgatacaaccataaaatgataattacacccataaattgataattatcacacccataaattgatattgcctcttcatggtctaaacttcagtaagtttacgacattttcatgaagaggtcatttccggggatccatggagaaaaaaatcactggatataccaccgttgatatatcccaatggcatcgtaaagaacattttgaggcatttcagtcagttgctcaatgtacctataaccagaccgttcagctggatattacggcctttttaaagaccgtaaagaaaaataagcacaagttttatccggcctttattcacattcttgcccgcctgatgaatgctcatccggagttccgtatggcaatgaaagacggtgagctggtgatatgggatagtgttcacccttgttacaccgttttccatgagcaaactgaaacgttttcatcgctctggagtgaataccacgacgatttccggcagtttctacacatatattcgcaagatgtggcgtgttacggtgaaaacctggcctatttccctaaagggtttattgagaatatgtttttcgtctcagccaatccctgggtgagtttcaccagttttgatttaaacgtggccaatatggacaacttcttcgcccccgttttcactatgggcaaatattatacgcaaggcgacaaggtgctgatgccgctggcgattcaggttcatcatgccgtttgtgatggcttccatgtcggcagaatgcttaatgaattacaacagtactgcgatgagtggcagggcggggcgtaatttttttaaggcagttattggtgcccttctagagtccttactgcagtagttttgctgaaatactcgattcacaaaaatatcaacttatggttgttttgtgagatatcaatatatggttgttttgtggttaagttgctgattataaataattattaaatatcactttatggttgcatcaacaggtaccgagctcgaattcactggccgtcgttttacaacgtcgtgactgggaaaaccctggcgttacccaacttaatcgccttgcagcacatccccctttcgccagctggcgtaatagcgaagaggcccgcaccgatcgcccttcccaacagttgcgcagcctgaatggcgaatggcgcctgatgcggtattttctccttacgcatctgtgcggtatttcacaccgcatatggtgcactctcagtacaatctgctctgatgccgcatagttaagccagccccgacacccgccaacacccgctgacgcgccctgacgggcttgtctgctcccggcatccgcttacagacaagctgtgaccgtctccgggagctgcatgtgtcagaggttttcaccgtcatcaccgaaacgcgcgagacgaaagggcctcgtgatacgcctatttttataggttaatgtcatgataataatggtttcttagacgtcaggtggcacttttcggggaaatgtgcgcggaacccctatttgtttatttttctaaatacattcaaatatgtatccgctcatgagacaataaccctgataaatgcttcaataatattgaaaaaggaagagtatgagtattcaacatttccgtgtcgcccttattcccttttttgcggcattttgccttcctgtttttgctcacccagaaacgctggtgaaagtaaaagatgctgaagatcagttgggtgcacgagtgggttacatcgaactggatctcaacagcggtaagatccttgagagttttcgccccgaagaacgttttccaatgatgagcacttttaaagttctgctatgtggcgcggtattatcccgtattgacgccgggcaagagcaactcggtcgccgcatacactattctcagaatgacttggttgagtactcaccagtcacagaaaagcatcttacggatggcatgacagtaagagaattatgcagtgctgccataaccatgagtgataacactgcggccaacttacttctgacaacgatcggaggaccgaaggagctaaccgcttttttgcacaacatgggggatcatgtaactcgccttgatcgttgggaaccggagctgaatgaagccataccaaacgacgagcgtgacaccacgatgcctgtagcaatggcaacaacgttgcgcaaactattaactggcgaactacttactctagcttcccggcaacaattaatagactggatggaggcggataaagttgcaggaccacttctgcgctcggcccttccggctggctggtttattgctgataaatctggagccggtgagcgtgggtctcgcggtatcattgcagcactggggccagatggtaagccctcccgtatcgtagttatctacacgacggggagtcaggcaactatggatgaacgaaatagacagatcgctgagataggtgcctcactgattaagcattggtaactgtcagaccaagtttactcatatatactttagattgatttaaaacttcatttttaatttaaaaggatctaggtgaagatcctttttgataatctcatgaccaaaatcccttaacgtgagttttcgttccactgagcgtcagaccccgtagaaaagatcaaaggatcttc

SEQ ID NO: 5596 - DNA, 6858 bp, Artificial Sequence
  Description of Artificial Sequence: Synthetic polynucleotide
tcactctagatttcagtgcaatttatctcttcaaatgtagcacctgaagtcagccccatacgatataagttgtaattctcatgttagtcatgccccgcgcccaccggaaggagctgactgggttgaaggctctcaagggcatcggtcgagatcccggtgcctaatgagtgagctaacttacattaattgcgttgcgctcactgcccgctttccagtcgggaaacctgtcgtgccagctgcattaatgaatcggccaacgcgcggggagaggcggtttgcgtattgggcgccagggtggtttttcttttcaccagtgagacgggcaacagctgattgcccttcaccgcctggccctgagagagttgcagcaagcggtccacgctggtttgccccagcaggcgaaaatcctgtttgatggtggttaacggcgggatataacatgagctgtcttcggtatcgtcgtatcccactaccgagatgtccgcaccaacgcgcagcccggactcggtaatggcgcgcattgcgcccagcgccatctgatcgttggcaaccagcatcgcagtgggaacgatgccctcattcagcatttgcatggtttgttgaaaaccggacatggcactccagtcgccttcccgttccgctatcggctgaatttgattgcgagtgagatatttatgccagccagccagacgcagacgcgccgagacagaacttaatgggcccgctaacagcgcgatttgctggtgacccaatgcgaccagatgctccacgcccagtcgcgtaccgtcttcatgggagaaaataatactgttgatgggtgtctggtcagagacatcaagaaataacgccggaacattagtgcaggcagcttccacagcaatggcatcctggtcatccagcggatagttaatgatcagcccactgacgcgttgcgcgagaagattgtgcaccgccgctttacaggcttcgacgccgcttcgttctaccatcgacaccaccacgctggcacccagttgatcggcgcgagatttaatcgccgcgacaatttgcgacggcgcgtgcagggccagactggaggtggcaacgccaatcagcaacgactgtttgcccgccagttgttgtgccacgcggttgggaatgtaattcagctccgccatcgccgcttccactttttcccgcgttttcgcagaaacgtggctggcctggttcaccacgcgggaaacggtctgataagagacaccggcatactctgcgacatcgtataacgttactggtttcacattcaccaccctgaattgactctcttccgggcgctatcatgccataccgcgaaaggttttgcgccattcgatggtgtccgggatctcgacgctctcccttatgcgactcctgcattaggaaattaatacgactcactataggggaattgtgagcggataacaattcccctgtagaaataattttgtttaactttaataaggagatataccatggcgacaagtttacctacgccctcagcaattacgacttcggcgttagagtatgcattccatactcccgctcgcaatctaacgaaatctcgcggaaaaaacattcatcgttatgtcagtgtaaagatgagtaagaggattacggtagaatctactctagagtgtgatgcctgctatcactttgattttgagccaagtattgttcgcttttgcgctcaaccgattcgatttttatattatctcaatggtcagtctcactcctatgttcctgactttctagttcaatttgataccaacgagtttgttctatatgaagtaaagtcagcttatgctaagaacaaacctgattttgatgttgaatgggaggcgaaagtaaaagcagcaactgaactagggctagaattggagcttgttgaagagagtgatattagggatacggttgtattaaataatcttaagcgcatgcatcgttatgcttcgaaagatgagctgaataacgtacataactctctcttaaaaataataaagtacaatggcgcccaatctgcaagatgcttgggagaacagttgggtttaaaaggccgaactgttttaccaattttgtgcgatttgctgtcaaggtgtttactcgatacacgtttggataagcctctatctcttgaatctcgatttgagttggccagttatggctaagaaagggttctcaagtttccatagaaaagcagtctcttcccaagatacgcttgaatcgatagagcttgtctctagcgctaattgtctagaaagtgttacgtatcaagatatatcagcatttcccgaaacaattgcggtagagattaatttccgattaagcattcttcgctttttagcgcgaaagtgcgaaaccattgtggccaaatcaattgaaccacatcgtgtagagctacagcaaaactatagtagaaaaatacccagtgcaataacgatatatcgatggtggcttgcttttcgaaaatcagactacaaccccattagcttagcacctaatatcaaggatagaggtaatagagagacaaaagtgtcaacagttgttgattctattatggaacaggcagttgaaagagttatatctggacgaaaagtcaatgttagctctgcatataaacgtgttcgacgaaaagttcgtcaatacaatctaactcatggaacgaaatacacgtatcctaagtacgaatctgtaagaaagcgagtaaaaaagaaaaccccatttgagttattagccgcagggaaaggggagagagtagctaagagagagtttcgccgaatgggaaaaaagatcctcacgtctagcgtgctagagagggttgaaatagatcacactgtcgttgacctttttgcagtacacgaagagtatcgaatcccattgggccgaccttggcttactcaattggttgattgttacagtaaagctgtaatcggtttttatttaggtttcgagcctcctagctatgtgtcggtttcccttgcacttaagaatgcaatacaacgcaaagatgacttaatctcctcgtatgaatcgatcgagaatgaatggctatgttatggcatcccagacctactcgtaactgataatggtaaagagtttttgtcgaaagcatttgatcaagcatgtgaatcactattgatcaatgtgcatcaaaataaagttgagacgcccgacaacaaacctcatgttgaacgtaactacgggactattaatacttctctgttagacgatttacctgggaaatccttcagccagtaccttcaaagagaagggtacgactctgtgggagaagctacccttacactcaatgagattagagaaatttacttaatttggttggtggatatttatcataaaaaacccaatcagagaggcactaattgtcctaatgttgcgtggaaaaagggttgtcaagaatgggaaccagaggagttctctggttctaaagacgaattagactttaaatttgctattgttgattacaaacaacttactaaagtagggataactgtctacaaagaactgagttatagcaatgaccgtttagctgaatatagagggaagaaaggaaaccataaagttcagttcaagtataaccctgagtgtatggcagttatttgggtgttggatgaggatatgaatgagtactttacagttaatgcgattgactacgaatatgcaagtagagtatcactttggcaacataaatataacatgaaatatcaagcagaactaaattcagcagaatatgatgaggacaaggaaattgatgcagaaataaaaattgaagaaatcgcagatcgttcaattgttaagactaacaaaatcagagctcggaggcgtggcgctaggcatcaagagaatagcgcaagggctaagtcaatcagtaatgcgaacccggcctcgatacaaaaacatgaagatgaaatcgttagtgcagataatgacgattgggatattgattatgtctgagaaatcgtcaaatgagtgaaacgcgtgaggctcgtatatcaagagctaaaagggcatttgtatccacaccgagcgttaggaaaatcttgagttacatggatagatgtagagatctatcagacctagagtctgagcctacatgcatgatggtctatggtgcttcgggtgtaggtaaaacgaccgtcatcaagaaatacttaaatcaaaacagaagagagtccgaagccgggggcgatataataccggttttgcatattgagttgccagacaatgcgaagccagtagatgcagcaagggaattgctggttgaaatgggtgacccgctagcactttatgaaactgacttagctagattgacgaaaagactgactgaattaatccctgcggtcggcgtgaagctgattattatcgatgagttccaacatttggtggaagaaaggtcaaatcgggttcttacccaagtaggtaattggctaaaaatgatacttaacaaaacgaaatgtccaattgttatatttggtatgccatactcaaaagttgtactgcaagcaaactcgcaacttcacgggcgattttccattcaggttgaactgcgcccctttagctaccagggaggtagaggtgtatttaaaacttttttggaataccttgataaagccctaccttttgaaaaacaggctggcttagccaacgaaagtttgcagaaaaaattgtatgcattctctcagggaaacatgcgttcgttgagaaaccttatttatcaagcatctatcgaagcaattgataatcagcatgagacgataaccgaagaagatttcgtttttgcatcgaagttgacatcgggcgataaacccaactcatggaaaaatccttttgaggagggtgttgaggtaacagaagatatgttacgaccgccaccaaaagatattggttgggaggactatttgagacattcaaccccgagagtgagtaaaccaggtagaaataaaaactttttcgaataacctaggctgctgccaccgctgagcaataactagcataaccccttggggcctctaaacgggtcttgaggggttttttgctgaaacctcaggcatttgagaagcacacggtcacactgcttccggtagtcaataaaccggtaaaccagcaatagacataagcggctatttaacgaccctgccctgaaccgacgacaagctgacgaccgggtctccgcaagtggcacttttcggggaaatgtgcgcggaacccctatttgtttatttttctaaatacattcaaatatgtatccgctcatgaattaattcttagaaaaactcatcgagcatcaaatgaaactgcaatttattcatatcaggattatcaataccatatttttgaaaaagccgtttctgtaatgaaggagaaaactcaccgaggcagttccataggatggcaagatcctggtatcggtctgcgattccgactcgtccaacatcaatacaacctattaatttcccctcgtcaaaaataaggttatcaagtgagaaatcaccatgagtgacgactgaatccggtgagaatggcaaaagtttatgcatttctttccagacttgttcaacaggccagccattacgctcgtcatcaaaatcactcgcatcaaccaaaccgttattcattcgtgattgcgcctgagcgagacgaaatacgcggtcgctgttaaaaggacaattacaaacaggaatcgaatgcaaccggcgcaggaacactgccagcgcatcaacaatattttcacctgaatcaggatattcttctaatacctggaatgctgttttcccggggatcgcagtggtgagtaaccatgcatcatcaggagtacggataaaatgcttgatggtcggaagaggcataaattccgtcagccagtttagtctgaccatctcatctgtaacatcattggcaacgctacctttgccatgtttcagaaacaactctggcgcatcgggcttcccatacaatcgatagattgtcgcacctgattgcccgacattatcgcgagcccatttatacccatataaatcagcatccatgttggaatttaatcgcggcctagagcaagacgtttcccgttgaatatggctcatactcttcctttttcaatattattgaagcatttatcagggttattgtctcatgagcggatacatatttgaatgtatttagaaaaataaacaaataggcatgctagcgcagaaacgtcctagaagatgccaggaggatacttagcagagagacaataaggccggagcgaagccgtttttccataggctccgcccccctgacgaacatcacgaaatctgacgctcaaatcagtggtggcgaaacccgacaggactataaagataccaggcgtttccccctgatggctccctcttgcgctctcctgttcccgtcctgcggcgtccgtgttgtggtggaggctttacccaaatcaccacgtcccgttccgtgtagacagttcgctccaagctgggctgtgtgcaagaaccccccgttcagcccgactgctgcgccttatccggtaactatcatcttgagtccaacccggaaagacacgacaaaacgccactggcagcagccattggtaactgagaattagtggatttagatatcgagagtcttgaagtggtggcctaacagaggctacactgaaaggacagtatttggtatctgcgctccactaaagccagttaccaggttaagcagttccccaactgacttaaccttcgatcaaaccgcctccccaggcggttttttcgtttacagagcaggagattacgacgatcgtaaaaggatctcaagaagatcctttacggattcccgacacca

SEQ ID NO: 5597 - DNA, 8428 bp, Artificial Sequence
  Description of Artificial Sequence: Synthetic polynucleotide
ttttctactgaaccgctctagatttcagtgcaatttatctcttcaaatgtagcacctgaagtcagccccatacgatataagttgtaattctcatgttagtcatgccccgcgcccaccggaaggagctgactgggttgaaggctctcaagggcatcggtcgagatcccggtgcctaatgagtgagctaacttacattaattgcgttgcgctcactgcccgctttccagtcgggaaacctgtcgtgccagctgcattaatgaatcggccaacgcgcggggagaggcggtttgcgtattgggcgccagggtggtttttcttttcaccagtgagacgggcaacagctgattgcccttcaccgcctggccctgagagagttgcagcaagcggtccacgctggtttgccccagcaggcgaaaatcctgtttgatggtggttaacggcgggatataacatgagctgtcttcggtatcgtcgtatcccactaccgagatgtccgcaccaacgcgcagcccggactcggtaatggcgcgcattgcgcccagcgccatctgatcgttggcaaccagcatcgcagtgggaacgatgccctcattcagcatttgcatggtttgttgaaaaccggacatggcactccagtcgccttcccgttccgctatcggctgaatttgattgcgagtgagatatttatgccagccagccagacgcagacgcgccgagacagaacttaatgggcccgctaacagcgcgatttgctggtgacccaatgcgaccagatgctccacgcccagtcgcgtaccgtcttcatgggagaaaataatactgttgatgggtgtctggtcagagacatcaagaaataacgccggaacattagtgcaggcagcttccacagcaatggcatcctggtcatccagcggatagttaatgatcagcccactgacgcgttgcgcgagaagattgtgcaccgccgctttacaggcttcgacgccgcttcgttctaccatcgacaccaccacgctggcacccagttgatcggcgcgagatttaatcgccgcgacaatttgcgacggcgcgtgcagggccagactggaggtggcaacgccaatcagcaacgactgtttgcccgccagttgttgtgccacgcggttgggaatgtaattcagctccgccatcgccgcttccactttttcccgcgttttcgcagaaacgtggctggcctggttcaccacgcgggaaacggtctgataagagacaccggcatactctgcgacatcgtataacgttactggtttcacattcaccaccctgaattgactctcttccgggcgctatcatgccataccgcgaaaggttttgcgccattcgatggtgtccgggatctcgacgctctcccttatgcgactcctgcattaggaaattaatacgactcactataggggaattgtgagcggataacaattcccctgtagaaataattttgtttaactttaataaggagatataccatgggtgaactgccgagtaggtagctgataacgagacctctggtctcgtgaactgccgagtaggtagctgataacggatccgaattcgagctcggcgcgcctgcaggtcgacaagcttgcggccgcataatgcttaagtcgaacagaaagtaatcgtattgtacacggccgcataatcgaaattaatacgactcactataggggaattgtgagcggataacaattccccatcttagtatattagttaagtataagaaggagatatacatatgtttttgcaaagacctaaaccttacagcgatgaaagtttagaaagtttctttatccgagtggctaacaaaaatggctacggtgatgtccatcgcttcctagaagccactaaacgattccttcaagacattgaccataatggctatcaaacctttccgactgatataactcggataaacccatactcagctaaaaacagttccagcgcacgaactgcgtcattcctgaaacttgcacaattgacatttaatgaaccgccagagctacttgggttggcaattaacagaacaaacatgaaatactcgccgtcaactagcgcggttgttagaggtgcagaagtctttcctcgcagtttactacggacgcactccatcccctgctgtcctttgtgtctgcgagaaaatggctacgcctcctacctttggcactttcaggggtacgaatactgccacagccataacgtacctttaattaccacttgtagctgtggtaaggagtttgactaccgagtatctgggttaaagggcatttgctgcaaatgcaaggagcctatcaccttaaccagcagggagaacggtcatgaggcagcgtgtactgtttcaaactggcttgctggccatgaatctaaacctctgccaaatcttcctaaaagctaccgatggggtttagttcattggtggatgggtattaaagatagcgagttcgatcacttttcgttcgttcaatttttctcaaactggccaaggtcattccactcgataatcgaagatgaagtagagttcaaccttgagcatgctgttgtcagcacgtctgaattacgactaaaagatcttcttggtcgattgtttttcggttcaattcggttacctgagcggaatcttcaacacaatatcatccttggtgagcttctctgctatttagaaaatcgtttatggcaagacaagggattaatcgccaacctcaaaatgaacgcgttagaggcgactgtaatgttaaattgtagcctcgatcagattgcatcaatggttgaacaacgcatcttgaagccaaatcgaaaaagcaagcccaacagccctcttgatgttaccgattatctatttcatttcggcgatattttctgtctttggttagctgagttccaaagcgatgagtttaaccgttcgttttatgtgtcgaggtggtaaatgcaaactctgaaagaactaatcgcatccaatcctgacgacttaacaactgaacttaagagagcatttcgtccactcacaccgcatattgcaattgatggtaatgaacttgacgcactgacgatattagtcaatttaaccgataagactgatgatcagaaagacctgctcgatcgagccaaatgcaagcaaaaacttcgagatgaaaaatggtgggctagctgcataaattgcgttaattacagacaaagccataacccaaaattcccggatatacgttctgaaggcgtgattcgaacccaagccctgggtgaattaccgagtttcctactctcgtcctcaaaaatcccaccataccattggtcatatagccatgattcaaaatacgtcaacaaaagcgcattcctcaccaatgagttttgttgggatggtgagatctcatgtttgggtgagcttcttaaagatgcagatcacccactttggaatactttgaaaaagttaggttgttctcaaaaaacttgcaaagcaatggcaaaacaactagctgatattactctcacgactatcaatgtcacactcgcaccaaattacctgactcaaatatctctccccgatagtgatacatcctacatttcactctctcctgttgcatcgctatcgatgcaaagccactttcatcagaggctccaagatgaaaatcggcatagcgcgataacgcggtttagccgaactaccaacatgggggtcactgcgatgacatgtggcggcgcatttagaatgttaaagtctggcgctaagttttccagcccccctcatcaccgattaaacagtaaacgaagttggttgacgtcagagcatgttcagtcattaaaacagtaccagcgcctcaacaaaagcctcatacctgaaaactctcggattgcactccgtagaaaatacaaaatcgagcttcaaaatatggtcagatcttggtttgcaatgcaagaccatacccttgattcgaacatacttatccaacatttgaatcatgacctatcttacttaggagccacaaaacgttttgcatacgatccagcgatgaccaagctctttactgagcttttgaaacgagagttatcaaattcaatcaataatggtgagcaacacactaatggatcgtttttagtcctaccgaatatcagggtttgtggcgcaacagctttaagctccccggtaacggtggggattccatcacttacagctttctttggcttcgttcacgcatttgaacggaatataaatcgcaccacctcatcgtttcgtgttgaatcctttgcgatatgcgtccatcaactacatgtcgagaagcgaggtttgacagcagagtttgtggaaaaaggcgacgggactatatccgctcccgcgacccgggatgactggcagtgtgatgtcgtatttagccttattttgaacaccaactttgctcaacatattgaccaagatacgttagttacatcactaccaaagcgattggctcggggttcagcaaaaattgcgattgatgactttaaacatatcaactcattctcgacattagaaacagcgatcgaatctctgccaatagaagctggtaggtggttatcactttacgcacagtcaaacaataatctaagtgatctattagcagccatgacagaggaccatcagctcatggcaagctgcgtcggttaccacttgttagaagagcccaaagataaaccaaactccctcagaggttacaaacacgctatcgccgagtgcatcattggactcattaactcaatcacctttagctcagagactgatcccaacacaatcttttggtcgctaaagaactatcaaaactacctagtggtacagccaaggagtatcaacgatgaaactaccgacaaatctagcctatgagcgctctatcgacccatcagatgtctgtttttttgtcgtctggcccgatgatagaaaaacacctttaacctacaattctcgtactctgctcgggcaaatggaagcggcatcattagcctatgatgtctcaggtcaaccaataaaaagtgccaccgctgaggcgttagctcaagggaaccctcatcaagttgatttctgccacgttccatacggtgcgagtcatattgaatgcagtttctccgtctcgttttcttctgaactacgtcaaccatataagtgtaactcaagcaaagttaaacaaacgctagtgcaattagtcgagctctacgaaacgaaaatcggctggactgagctagcaacccgatatttgatgaacatttgcaacggtaaatggctgtggaaaaatacccgtaaagcctattgctggaacattgtacttacaccttggccttggaacggggaaaaggttggatttgaagatattcgtactaactacacctcacggcaagactttaaaaataataaaaattggtctgctatagttgaaatgatcaaaaccgcattttctagtactgatgggctggcgatatttgaagtcagggccaccttgcacttgccaacgaatgctatggtgcggccaagccaagttttcacagaaaaagaaagtggcagtaaaagtaaatctaaaactcaaaacagtcgagtttttcagagtacaactattgatggtgaacgatcgccaatactaggggcctttaaaacgggagcagctattgcaaccattgacgactggtatcctgaagccactgagccactaagggtcggacggtttggggttcatcgcgaagatgtcacttgctaccgtcatccgtctaccggaaaagattttttctcgatattacaacaagcagagcactatattgaagtgttgagcgccaacaaaactcccgctcaagaaactatcaacgacatgcactttttaatggctaacctgattaagggtgggatgttccagcataaaggagactgactgtgaaatggtattataagacaatcacctttctgccagagttgtgcaacaacgagtcactggctgcaaagtgtctccgcgttctgcatggatttaactatcagtatgagacacgaaatatcggcgtttcatttccgctttggtgtgatgcaacggttggaaaaaagatttcatttgtcagcaagaacaagatagaactcgacttactacttaaacaacactatttcgtccaaatggaacaacttcaatactttcatatatccaacactgttctcgtcccagaagattgtacatacgtttcctttagacgctgtcaatctatagataagctcacagcagcagggctggcaaggaaaatcagacgcctggagaaacgtgctctatctagaggcgagcaatttgacccatcatcttttgctcaaaaagagcatactgcaatagcgcactaccactcacttggggagtccagcaaacagacgaaccgcaactttcgactcaatatcaggatgctctcggagcaaccccgtgaggggaactcgatttttagtagctatggcttatcaaattcagaaaactcgtttcagcctgtacccttaatctgacctaggctgctgccaccgctgagcaataactagcataaccccttggggcctctaaacgggtcttgaggggttttttgctgaaacctcaggcatttgagaagcacacggtcacactgcttccggtagtcaataaaccggtaaaccagcaatagacataagcggctatttaacgaccctgccctgaaccgacgaccgggtcatcgtggccggatcttgcggcccctcggcttgaacgaattgttagacattatttgccgactaccttggtgatctcgcctttcacgtagtggacaaattcttccaactgatctgcgcgcgaggccaagcgatcttcttcttgtccaagataagcctgtctagcttcaagtatgacgggctgatactgggccggcaggcgctccattgcccagtcggcagcgacatccttcggcgcgattttgccggttactgcgctgtaccaaatgcgggacaacgtaagcactacatttcgctcatcgccagcccagtcgggcggcgagttccatagcgttaaggtttcatttagcgcctcaaatagatcctgttcaggaaccggatcaaagagttcctccgccgctggacctaccaaggcaacgctatgttctcttgcttttgtcagcaagatagccagatcaatgtcgatcgtggctggctcgaagatacctgcaagaatgtcattgcgctgccattctccaaattgcagttcgcgcttagctggataacgccacggaatgatgtcgtcgtgcacaacaatggtgacttctacagcgcggagaatctcgctctctccaggggaagccgaagtttccaaaaggtcgttgatcaaagctcgccgcgttgtttcatcaagccttacggtcaccgtaaccagcaaatcaatatcactgtgtggcttcaggccgccatccactgcggagccgtacaaatgtacggccagcaacgtcggttcgagatggcgctcgatgacgccaactacctctgatagttgagtcgatacttcggcgatcaccgcttccctcatactcttcctttttcaatattattgaagcatttatcagggttattgtctcatgagcggatacatatttgaatgtatttagaaaaataaacaaatagctagctcactcggtcgctacgctccgggcgtgagactgcggcgggcgctgcggacacatacaaagttacccacagattccgtggataagcaggggactaacatgtgaggcaaaacagcagggccgcgccggtggcgtttttccataggctccgccctcctgccagagttcacataaacagacgcttttccggtgcatctgtgggagccgtgaggctcaaccatgaatctgacagtacgggcgaaacccgacaggacttaaagatccccaccgtttccggcgggtcgctccctcttgcgctctcctgttccgaccctgccgtttaccggatacctgttccgcctttctcccttacgggaagtgtggcgctttctcatagctcacacactggtatctcggctcggtgtaggtcgttcgctccaagctgggctgtaagcaagaactccccgttcagcccgactgctgcgccttatccggtaactgttcacttgagtccaacccggaaaagcacggtaaaacgccactggcagcagccattggtaactgggagttcgcagaggatttgtttagctaaacacgcggttgctcttgaagtgtgcgccaaagtccggctacactggaaggacagatttggttgctgtgctctgcgaaagccagttaccacggttaagcagttccccaactgacttaaccttcgatcaaaccacctccccaggtggttttttcgtttacagggcaaaagattacgcgcagaaaaaaaggatctcaagaagatcctttgatc

SEQ ID NO: 5598 - DNA, 4955 bp, Artificial Sequence
  Description of Artificial Sequence: Synthetic polynucleotide
atcgatgcataatgtgcctgtcaaatggacgaagcagggattctgcaaaccctatgctactccgtcaagccgtcaattgtctgattcgttaccaattatgacaacttgacggctacatcattcactttttcttcacaaccggcacggaactcgctcgggctggccccggtgcattttttaaatacccgcgagaaatagagttgatcgtcaaaaccaacattgcgaccgacggtggcgataggcatccgggtggtgctcaaaagcagcttcgcctggctgatacgttggtcctcgcgccagcttaagacgctaatccctaactgctggcggaaaagatgtgacagacgcgacggcgacaagcaaacatgctgtgcgacgctggcgatatcaaaattgctgtctgccaggtgatcgctgatgtactgacaagcctcgcgtacccgattatccatcggtggatggagcgactcgttaatcgcttccatgcgccgcagtaacaattgctcaagcagatttatcgccagcagctccgaatagcgcccttccccttgcccggcgttaatgatttgcccaaacaggtcgctgaaatgcggctggtgcgcttcatccgggcgaaagaaccccgtattggcaaatattgacggccagttaagccattcatgccagtaggcgcgcggacgaaagtaaacccactggtgataccattcgcgagcctccggatgacgaccgtagtgatgaatctctcctggcgggaacagcaaaatatcacccggtcggcaaacaaattctcgtccctgatttttcaccaccccctgaccgcgaatggtgagattgagaatataacctttcattcccagcggtcggtcgataaaaaaatcgagataaccgttggcctcaatcggcgttaaacccgccaccagatgggcattaaacgagtatcccggcagcaggggatcattttgcgcttcagccatacttttcatactcccgccattcagagaagaaaccaattgtccatattgcatcagacattgccgtcactgcgtcttttactggctcttctcgctaaccaaaccggtaaccccgcttattaaaagcattctgtaacaaagcgggaccaaagccatgacaaaaacgcgtaacaaaagtgtctataatcacggcagaaaagtccacattgattatttgcacggcgtcacactttgctatgccatagcatttttatccataagattagcggatcctacctgacgctttttatcgcaactctctactgtttctccatacccgtttttttgggctagcaggaggaattcaccatggtacccggggatcctctagagtcgacctgcaggcatgcaagcttggctgttttggcggatgagagaagattttcagcctgatacagattaaatcagaacgcagaagcggtctgataaaacagaatttgcctggcggcagtagcgcggtggtcccacctgaccccatgccgaactcagaagtgaaacgccgtagcgccgatggtagtgtggggtctccccatgcgagagtagggaactgccaggcatcaaataaaacgaaaggctcagtcgaaagactgggcctttcgttttatctgttgtttgtcggtgaacgctctcctgagtaggacaaatccgccgggagcggatttgaacgttgcgaagcaacggcccggagggtggcgggcaggacgcccgccataaactgccaggcatcaaattaagcagaaggccatcctgacggatggcctttttgcgtttctacaaactcttttgtttatttttctaaatacattcaaatatgtatccgctcatgagacaataaccctgataaatgcttcaataatattgaaaaaggaagagtatgagtattcaacatttccgtgtcgcccttattcccttttttgcggcattttgccttcctgtttttgctcacccagaaacgctggtgaaagtaaaagatgctgaagatcagttgggtgcacgagtgggttacatcgaactggatctcaacagcggtaagatccttgagagttttcgccccgaagaacgttttccaatgatgagcacttttaaagttctgctatgtggcgcggtattatcccgtgttgacgccgggcaagagcaactcggtcgccgcatacactattctcagaatgacttggttgagtactcaccagtcacagaaaagcatcttacggatggcatgacagtaagagaattatgcagtgctgccataaccatgagtgataacactgcggccaacttacttctgacaacgatcggaggaccgaaggagctaaccgcttttttgcacaacatgggggatcatgtaactcgccttgatcgttgggaaccggagctgaatgaagccataccaaacgacgagcgtgacaccacgatgcctgtagcaatggcaacaacgttgcgcaaactattaactggcgaactacttactctagcttcccggcaacaattaatagactggatggaggcggataaagttgcaggaccacttctgcgctcggcccttccggctggctggtttattgctgataaatctggagccggtgagcgtgggtctcgcggtatcattgcagcactggggccagatggtaagccctcccgtatcgtagttatctacacgacggggagtcaggcaactatggatgaacgaaatagacagatcgctgagataggtgcctcactgattaagcattggtaactgtcagaccaagtttactcatatatactttagattgatttacgcgccctgtagcggcgcattaagcgcggcgggtgtggtggttacgcgcagcgtgaccgctacacttgccagcgccctagcgcccgctcctttcgctttcttcccttcctttctcgccacgttcgccggctttccccgtcaagctctaaatcgggggctccctttagggttccgatttagtgctttacggcacctcgaccccaaaaaacttgatttgggtgatggttcacgtagtgggccatcgccctgatagacggtttttcgccctttgacgttggagtccacgttctttaatagtggactcttgttccaaacttgaacaacactcaaccctatctcgggctattcttttgatttataagggattttgccgatttcggcctattggttaaaaaatgagctgatttaacaaaaatttaacgcgaattttaacaaaatattaacgtttacaatttaaaaggatctaggtgaagatcctttttgataatctcatgaccaaaatcccttaacgtgagttttcgttccactgagcgtcagaccccgtagaaaagatcaaaggatcttcttgagatcctttttttctgcgcgtaatctgctgcttgcaaacaaaaaaaccaccgctaccagcggtggtttgtttgccggatcaagagctaccaactctttttccgaaggtaactggcttcagcagagcgcagataccaaatactgtccttctagtgtagccgtagttaggccaccacttcaagaactctgtagcaccgcctacatacctcgctctgctaatcctgttaccagtggctgctgccagtggcgataagtcgtgtcttaccgggttggactcaagacgatagttaccggataaggcgcagcggtcgggctgaacggggggttcgtgcacacagcccagcttggagcgaacgacctacaccgaactgagatacctacagcgtgagctatgagaaagcgccacgcttcccgaagggagaaaggcggacaggtatccggtaagcggcagggtcggaacaggagagcgcacgagggagcttccagggggaaacgcctggtatctttatagtcctgtcgggtttcgccacctctgacttgagcgtcgatttttgtgatgctcgtcaggggggcggagcctatggaaaaacgccagcaacgcggcctttttacggttcctggccttttgctggccttttgctcacatgttctttcctgcgttatcccctgattctgtggataaccgtattaccgcctttgagtgagctgataccgctcgccgcagccgaacgaccgagcgcagcgagtcagtgagcgaggaagcggaagagcgcctgatgcggtattttctccttacgcatctgtgcggtatttcacaccgcatatggtgcactctcagtacaatctgctctgatgccgcatagttaagccagtatacactccgctatcgctacgtgactgggtcatggctgcgccccgacacccgccaacacccgctgacgcgccctgacgggcttgtctgctcccggcatccgcttacagacaagctgtgaccgtctccgggagctgcatgtgtcagaggttttcaccgtcatcaccgaaacgcgcgaggcagctgcggtaaagctcatcagcgtggtcgtgaagcgattcacagatgtctgcctgttcatccgcgtccagctcgttgagtttctccagaagcgttaatgtctggcttctgataaagcgggccatgttaagggcggttttttcctgtttggtcactgatgcctccgtgtaagggggatttctgttcatgggggtaatgataccgatgaaacgagagaggatgctcacgatacgggttactgatgatgaacatgcccggttactggaacgttgtgagggtaaacaactggcggtatggatgcggcgggaccagagaaaaatcactcagggtcaatgccagcgctagcagcacgccatagtgactggcgatgctgtcggaatggacgatatcccgcaagaggcccggcagtaccggcataaccaagcctatgcctacagcatccagggtgacggtgccgaggatgacgatgagcgcattgttagatttcatacacggtgcctgactgcgttagcaatttaactgtgataaactaccgcattaaagctagctt

SEQ ID NO: 5599 - DNA, 5834 bp, Artificial Sequence
  Description of Artificial Sequence: Synthetic polynucleotide
cgtcagcttgtcgtcggttcagggcagggtcgttaaatagccgcttatgtctattgctggtttaccggtttattgactaccggaagcagtgtgaccgtgtgcttctcaaatgcctgaggtttcagcaaaaaacccctcaagacccgtttagaggccccaaggggttatgctagttattgctcagcggtggcagcagcctaggttattcgaaaaagtttttatttctacctggtttactcactctcggggttgaatgtctcaaatagtcctcccaaccaatatcttttggtggcggtcgtaacatatcttctgttacctcaacaccctcctcaaaaggatttttccatgagttgggtttatcgcccgatgtcaacttcgatgcaaaaacgaaatcttcttcggttatcgtctcatgctgattatcaattgcttcgatagatgcttgataaataaggtttctcaacgaacgcatgtttccctgagagaatgcatacaattttttctgcaaactttcgttggctaagccagcctgtttttcaaaaggtagggctttatcaaggtattccaaaaaagttttaaatacacctctacctccctggtagctaaaggggcgcagttcaacctgaatggaaaatcgcccgtgaagttgcgagtttgcttgcagtacaacttttgagtatggcataccaaatataacaattggacatttcgttttgttaagtatcatttttagccaattacctacttgggtaagaacccgatttgacctttcttccaccaaatgttggaactcatcgataataatcagcttcacgccgaccgcagggattaattcagtcagtcttttcgtcaatctagctaagtcagtttcataaagtgctagcgggtcacccatttcaaccagcaattcccttgctgcatctactggcttcgcattgtctggcaactcaatatgcaaaaccggtattatatcgcccccggcttcggactctcttctgttttgatttaagtatttcttgatgacggtcgttttacctacacccgaagcaccatagaccatcatgcatgtaggctcagactctaggtctgatagatctctacatctatccatgtaactcaagattttcctaacgctcggtgtggatacaaatgcccttttagctcttgatatacgagcctcacgcgtttcactcatttgacgatttctcagacataatcaatatcccaatcgtcattatctgcactaacgatttcatcttcatgtttttgtatcgaggccgggttcgcattactgattgacttagcccttgcgctattctcttgatgcctagcgccacgcctccgagctctgattttgttagtcttaacaattgaacgatctgcgatttcttcaatttttatttctgcatcaatttccttgtcctcatcatattctgctgaatttagttctgcttgatatttcatgttatatttatgttgccaaagtgatactctacttgcatattcgtagtcaatcgcattaactgtaaagtactcattcatatcctcatccaacacccaaataactgccatacactcagggttatacttgaactgaactttatggtttcctttcttccctctatattcagctaaacggtcattgctataactcagttctttgtagacagttatccctactttagtaagttgtttgtaatcaacaatagcaaatttaaagtctaattcgtctttagaaccagagaactcctctggttcccattcttgacaaccctttttccacgcaacattaggacaattagtgcctctctgattgggttttttatgataaatatccaccaaccaaattaagtaaatttctctaatctcattgagtgtaagggtagcttctcccacagagtcgtacccttctctttgaaggtactggctgaaggatttcccaggtaaatcgtctaacagagaagtattaatagtcccgtagttacgttcaacatgaggtttgttgtcgggcgtctcaactttattttgatgcacattgatcaatagtgattcacatgcttgatcaaatgctttcgacaaaaactctttaccattatcagttacgagtaggtctgggatgccataacatagccattcattctcgatcgattcatacgaggagattaagtcatctttgcgttgtattgcattcttaagtgcaagggaaaccgacacatagctaggaggctcgaaacctaaataaaaaccgattacagctttactgtaacaatcaaccaattgagtaagccaaggtcggcccaatgggattcgatactcttcgtgtactgcaaaaaggtcaacgacagtgtgatctatttcaaccctctctagcacgctagacgtgaggatcttttttcccattcggcgaaactctctcttagctactctctcccctttccctgcggctaataactcaaatggggttttcttttttactcgctttcttacagattcgtacttaggatacgtgtatttcgttccatgagttagattgtattgacgaacttttcgtcgaacacgtttatatgcagagctaacattgacttttcgtccagatataactctttcaactgcctgttccataatagaatcaacaactgttgacacttttgtctctctattacctctatccttgatattaggtgctaagctaatggggttgtagtctgattttcgaaaagcaagccaccatcgatatatcgttattgcactgggtatttttctactatagttttgctgtagctctacacgatgtggttcaattgatttggccacaatggtttcgcactttcgcgctaaaaagcgaagaatgcttaatcggaaattaatctctaccgcaattgtttcgggaaatgctgatatatcttgatacgtaacactttctagacaattagcgctagagacaagctctatcgattcaagcgtatcttgggaagagactgcttttctatggaaacttgagaaccctttcttagccataactggccaactcaaatcgagattcaagagatagaggcttatccaaacgtgtatcgagtaaacaccttgacagcaaatcgcacaaaattggtaaaacagttcggccttttaaacccaactgttctcccaagcatcttgcagattgggcgccattgtactttattatttttaagagagagttatgtacgttattcagctcatctttcgaagcataacgatgcatgcgcttaagattatttaatacaaccgtatccctaatatcactctcttcaacaagctccaattctagccctagttcagttgctgcttttactttcgcctcccattcaacatcaaaatcaggtttgttcttagcataagctgactttacttcatatagaacaaactcgttggtatcaaattgaactagaaagtcaggaacataggagtgagactgaccattgagataatataaaaatcgaatcggttgagcgcaaaagcgaacaatacttggctcaaaatcaaagtgatagcaggcatcacactctagagtagattctaccgtaatcctcttactcatctttacactgacataacgatgaatgttttttccgcgagatttcgttagattgcgagcgggagtatggaatgcatactctaacgccgaagtcgtaattgctgagggcgtaggtaaacttgtcgccatgagctgttacctccttgaaattgttatccgctcacaattccacacaacatacgagccggaagcataaagtgtaaagcctggggtgcctaatgagtgagctaactcacattaattgcgttgcgctcactgcccgctttccagtcgggaaacctgtcgtgccagctgcattaatgaatcggccaacgcgcggggagaggcggtttgcgtattgggcgccgggctcatgagcaaatattttatctgattaataagatgatcttcttgagatcgttttggtctgcgcgtaatctcttgctctgaaaacgaaaaaaccgccttgcagggcggtttttcgaaggttctctgagctaccaactctttgaaccgaggtaactggcttggaggagcgcagtcaccaaaacttgtcctttcagtttagccttaaccggcgcatgacttcaagactaactcctctaaatcaattaccagtggctgctgccagtggtgcttttgcatgtctttccgggttggactcaagacgatagttaccggataaggcgcagcggtcggactgaacggggggttcgtgcatacagtccagcttggagcgaactgcctacccggaactgagtgtcaggcgtggaatgagacaaacgcggccataacagcggaatgacaccggtaaaccgaaaggcaggaacaggagagcgcacgagggagccgccagggggaaacgcctggtatctttatagtcctgtcgggtttcgccaccactgatttgagcgtcagatttcgtgatgcttgtcaggggggcggagcctatggaaaaacggctttgccgcggccctctcacttccctgttaagtatcttcctggcatcttccaggaaatctccgccccgttcgtaagccatttccgctcgccgcagtcgaacgaccgagcgtagcgagtcagtgagcgaggaagcggaatatatcctgtatcacatattctgctgacgcaccggtgcagccttttttctcctgccacatgaagcacttcactgacaccctcatcagtgccaacatagtaagccagtatacactccgctagcgctgatgtccggcggtgcttttgccgttacgcaccaccccgtcagtagctgaacaggagggacagctgatagaaacagaagccactggagcacctcaaaaacaccatcatacactaaatcagtaagttggcagcatcacccgacgcactttgcgccgaataaatacctgtgacggaagatcacttcgcagaataaataaatcctggtgtccctgttgataccgggaagccctgggccaacttttggcgaaaatgagacgttgatcggcacgtaagaggttccaactttcaccataatgaaataagatcactaccgggcgtattttttgagttatcgagattttcaggagctaaggaagctaaaatggagaaaaaaatcactggatataccaccgttgatatatcccaatggcatcgtaaagaacattttgaggcatttcagtcagttgctcaatgtacctataaccagaccgttcagctggatattacggcctttttaaagaccgtaaagaaaaataagcacaagttttatccggcctttattcacattcttgcccgcctgatgaatgctcatccggaattccgtatggcaatgaaagacggtgagctggtgatatgggatagtgttcacccttgttacaccgttttccatgagcaaactgaaacgttttcatcgctctggagtgaataccacgacgatttccggcagtttctacacatatattcgcaagatgtggcgtgttacggtgaaaacctggcctatttccctaaagggtttattgagaatatgtttttcgtctcagccaatccctgggtgagtttcaccagttttgatttaaacgtggccaatatggacaacttcttcgcccccgttttcaccatgggcaaatattatacgcaaggcgacaaggtgctgatgccgctggcgattcaggttcatcatgccgtctgtgatggcttccatgtcggcagaatgcttaatgaattacaacagtactgcgatgagtggcagggcggggcgtaatttttttaaggcagttattggtgcccttaaacgggt

SEQ ID NO: 5600 - DNA, 10103 bp, Artificial Sequence
  Description of Artificial Sequence: Synthetic polynucleotide
ccgtcactgcgtcttttactggctcttctcgctaaccaaaccggtaaccccgcttattaaaagcattctgtaacaaagcgggaccaaagccatgacaaaaacgcgtaacaaaagtgtctataatcacggcagaaaagtccacattgattatttgcacggcgtcacactttgctatgccatagcatttttatccataagattagcggatcctacctgacgctttttatcgcaactctctactgtttctccatacccgtttttttgggctagcaggaggaattcaccatgtttttgcaaagacctaaaccttacagcgatgaaagtttagaaagtttctttatccgagtggctaacaaaaatggctacggtgatgtccatcgcttcctagaagccactaaacgattccttcaagacattgaccataatggctatcaaacctttccgactgatataactcggataaacccatactcagctaaaaacagttccagcgcacgaactgcgtcattcctgaaacttgcacaattgacatttaatgaaccgccagagctacttgggttggcaattaacagaacaaacatgaaatactcgccgtcaactagcgcggttgttagaggtgcagaagtctttcctcgcagtttactacggacgcactccatcccctgctgtcctttgtgtctgcgagaaaatggctacgcctcctacctttggcactttcaggggtacgaatactgccacagccataacgtacctttaattaccacttgtagctgtggtaaggagtttgactaccgagtatctgggttaaagggcatttgctgcaaatgcaaggagcctatcaccttaaccagcagggagaacggtcatgaggcagcgtgtactgtttcaaactggcttgctggccatgaatctaaacctctgccaaatcttcctaaaagctaccgatggggtttagttcattggtggatgggtattaaagatagcgagttcgatcacttttcgttcgttcaatttttctcaaactggccaaggtcattccactcgataatcgaagatgaagtagagttcaaccttgagcatgctgttgtcagcacgtctgaattacgactaaaagatcttcttggtcgattgtttttcggttcaattcggttacctgagcggaatcttcaacacaatatcatccttggtgagcttctctgctatttagaaaatcgtttatggcaagacaagggattaatcgccaacctcaaaatgaacgcgttagaggcgactgtaatgttaaattgtagcctcgatcagattgcatcaatggttgaacaacgcatcttgaagccaaatcgaaaaagcaagcccaacagccctcttgatgttaccgattatctatttcatttcggcgatattttctgtctttggttagctgagttccaaagcgatgagtttaaccgttcgttttatgtgtcgaggtggtaaatgcaaactctgaaagaactaatcgcatccaatcctgacgacttaacaactgaacttaagagagcatttcgtccactcacaccgcatattgcaattgatggtaatgaacttgacgcactgacgatattagtcaatttaaccgataagactgatgatcagaaagacctgctcgatcgagccaaatgcaagcaaaaacttcgagatgaaaaatggtgggctagctgcataaattgcgttaattacagacaaagccataacccaaaattcccggatatacgttctgaaggcgtgattcgaacccaagccctgggtgaattaccgagtttcctactctcgtcctcaaaaatcccaccataccattggtcatatagccatgattcaaaatacgtcaacaaaagcgcattcctcaccaatgagttttgttgggatggtgagatctcatgtttgggtgagcttcttaaagatgcagatcacccactttggaatactttgaaaaagttaggttgttctcaaaaaacttgcaaagcaatggcaaaacaactagctgatattactctcacgactatcaatgtcacactcgcaccaaattacctgactcaaatatctctccccgatagtgatacatcctacatttcactctctcctgttgcatcgctatcgatgcaaagccactttcatcagaggctccaagatgaaaatcggcatagcgcgataacgcggtttagccgaactaccaacatgggggtcactgcgatgacatgtggcggcgcatttagaatgttaaagtctggcgctaagttttccagcccccctcatcaccgattaaacagtaaacgaagttggttgacgtcagagcatgttcagtcattaaaacagtaccagcgcctcaacaaaagcctcatacctgaaaactctcggattgcactccgtagaaaatacaaaatcgagcttcaaaatatggtcagatcttggtttgcaatgcaagaccatacccttgattcgaacatacttatccaacatttgaatcatgacctatcttacttaggagccacaaaacgttttgcatacgatccagcgatgaccaagctctttactgagcttttgaaacgagagttatcaaattcaatcaataatggtgagcaacacactaatggatcgtttttagtcctaccgaatatcagggtttgtggcgcaacagctttaagctccccggtaacggtggggattccatcacttacagctttctttggcttcgttcacgcatttgaacggaatataaatcgcaccacctcatcgtttcgtgttgaatcctttgcgatatgcgtccatcaactacatgtcgagaagcgaggtttgacagcagagtttgtggaaaaaggcgacgggactatatccgctcccgcgacccgggatgactggcagtgtgatgtcgtatttagccttattttgaacaccaactttgctcaacatattgaccaagatacgttagttacatcactaccaaagcgattggctcggggttcagcaaaaattgcgattgatgactttaaacatatcaactcattctcgacattagaaacagcgatcgaatctctgccaatagaagctggtaggtggttatcactttacgcacagtcaaacaataatctaagtgatctattagcagccatgacagaggaccatcagctcatggcaagctgcgtcggttaccacttgttagaagagcccaaagataaaccaaactccctcagaggttacaaacacgctatcgccgagtgcatcattggactcattaactcaatcacctttagctcagagactgatcccaacacaatcttttggtcgctaaagaactatcaaaactacctagtggtacagccaaggagtatcaacgatgaaactaccgacaaatctagcctatgagcgctctatcgacccatcagatgtctgtttttttgtcgtctggcccgatgatagaaaaacacctttaacctacaattctcgtactctgctcgggcaaatggaagcggcatcattagcctatgatgtctcaggtcaaccaataaaaagtgccaccgctgaggcgttagctcaagggaaccctcatcaagttgatttctgccacgttccatacggtgcgagtcatattgaatgcagtttctccgtctcgttttcttctgaactacgtcaaccatataagtgtaactcaagcaaagttaaacaaacgctagtgcaattagtcgagctctacgaaacgaaaatcggctggactgagctagcaacccgatatttgatgaacatttgcaacggtaaatggctgtggaaaaatacccgtaaagcctattgctggaacattgtacttacaccttggccttggaacggggaaaaggttggatttgaagatattcgtactaactacacctcacggcaagactttaaaaataataaaaattggtctgctatagttgaaatgatcaaaaccgcattttctagtactgatgggctggcgatatttgaagtcagggccaccttgcacttgccaacgaatgctatggtgcggccaagccaagttttcacagaaaaagaaagtggcagtaaaagtaaatctaaaactcaaaacagtcgagtttttcagagtacaactattgatggtgaacgatcgccaatactaggggcctttaaaacgggagcagctattgcaaccattgacgactggtatcctgaagccactgagccactaagggtcggacggtttggggttcatcgcgaagatgtcacttgctaccgtcatccgtctaccggaaaagattttttctcgatattacaacaagcagagcactatattgaagtgttgagcgccaacaaaactcccgctcaagaaactatcaacgacatgcactttttaatggctaacctgattaagggtgggatgttccagcataaaggagactgactgtgaaatggtattataagacaatcacctttctgccagagttgtgcaacaacgagtcactggctgcaaagtgtctccgcgttctgcatggatttaactatcagtatgagacacgaaatatcggcgtttcatttccgctttggtgtgatgcaacggttggaaaaaagatttcatttgtcagcaagaacaagatagaactcgacttactacttaaacaacactatttcgtccaaatggaacaacttcaatactttcatatatccaacactgttctcgtcccagaagattgtacatacgtttcctttagacgctgtcaatctatagataagctcacagcagcagggctggcaaggaaaatcagacgcctggagaaacgtgctctatctagaggcgagcaatttgacccatcatcttttgctcaaaaagagcatactgcaatagcgcactaccactcacttggggagtccagcaaacagacgaaccgcaactttcgactcaatatcaggatgctctcggagcaaccccgtgaggggaactcgatttttagtagctatggcttatcaaattcagaaaactcgtttcagcctgtacccttaatctgacctaggctgctgccaccgctgagcaataactagcataaccccttggggcctctaaacgggtcttgaggggttttttgctgaaacctcaggcatttgagaagcacacggtcacactgcttccggtagtcaataaaccggtaaaccagcaatagacataagcggctatttaacgaccctgccctgaaccgacgaccgggtcatcgtggccggatcttgcggcccctcggcttgaacgaattgttagacattatttgccgactaccttggtgatctcgcctttcacgtagtggacaaattcttccaactgatctgcgcgcgaggccaagcgatcttcttcttgtccaagataagcctgtctagcttcaagtatgacgggctgatactgggccggcaggcgctccattgcccagtgtacccggggatcctctagagtcgacctgcaggcatgcaagcttggctgttttggcggatgagagaagattttcagcctgatacagattaaatcagaacgcagaagcggtctgataaaacagaatttgcctggcggcagtagcgcggtggtcccacctgaccccatgccgaactcagaagtgaaacgccgtagcgccgatggtagtgtggggtctccccatgcgagagtagggaactgccaggcatcaaataaaacgaaaggctcagtcgaaagactgggcctttcgttttatctgttgtttgtcggtgaacgctctcctgagtaggacaaatccgccgggagcggatttgaacgttgcgaagcaacggcccggagggtggcgggcaggacgcccgccataaactgccaggcatcaaattaagcagaaggccatcctgacggatggcctttttgcgtttctacaaactcttttgtttatttttctaaatacattcaaatatgtatccgctcatgagacaataaccctgataaatgcttcaataatattgaaaaaggaagagtatgagtattcaacatttccgtgtcgcccttattcccttttttgcggcattttgccttcctgtttttgctcacccagaaacgctggtgaaagtaaaagatgctgaagatcagttgggtgcacgagtgggttacatcgaactggatctcaacagcggtaagatccttgagagttttcgccccgaagaacgttttccaatgatgagcacttttaaagttctgctatgtggcgcggtattatcccgtgttgacgccgggcaagagcaactcggtcgccgcatacactattctcagaatgacttggttgagtactcaccagtcacagaaaagcatcttacggatggcatgacagtaagagaattatgcagtgctgccataaccatgagtgataacactgcggccaacttacttctgacaacgatcggaggaccgaaggagctaaccgcttttttgcacaacatgggggatcatgtaactcgccttgatcgttgggaaccggagctgaatgaagccataccaaacgacgagcgtgacaccacgatgcctgtagcaatggcaacaacgttgcgcaaactattaactggcgaactacttactctagcttcccggcaacaattaatagactggatggaggcggataaagttgcaggaccacttctgcgctcggcccttccggctggctggtttattgctgataaatctggagccggtgagcgtgggtctcgcggtatcattgcagcactggggccagatggtaagccctcccgtatcgtagttatctacacgacggggagtcaggcaactatggatgaacgaaatagacagatcgctgagataggtgcctcactgattaagcattggtaactgtcagaccaagtttactcatatatactttagattgatttacgcgccctgtagcggcgcattaagcgcggcgggtgtggtggttacgcgcagcgtgaccgctacacttgccagcgccctagcgcccgctcctttcgctttcttcccttcctttctcgccacgttcgccggctttccccgtcaagctctaaatcgggggctccctttagggttccgatttagtgctttacggcacctcgaccccaaaaaacttgatttgggtgatggttcacgtagtgggccatcgccctgatagacggtttttcgccctttgacgttggagtccacgttctttaatagtggactcttgttccaaacttgaacaacactcaaccctatctcgggctattcttttgatttataagggattttgccgatttcggcctattggttaaaaaatgagctgatttaacaaaaatttaacgcgaattttaacaaaatattaacgtttacaatttaaaaggatctaggtgaagatcctttttgataatctcatgaccaaaatcccttaacgtgagttttcgttccactgagcgtcagaccccgtagaaaagatcaaaggatcttcttgagatcctttttttctgcgcgtaatctgctgcttgcaaacaaaaaaaccaccgctaccagcggtggtttgtttgccggatcaagagctaccaactctttttccgaaggtaactggcttcagcagagcgcagataccaaatactgtccttctagtgtagccgtagttaggccaccacttcaagaactctgtagcaccgcctacatacctcgctctgctaatcctgttaccagtggctgctgccagtggcgataagtcgtgtcttaccgggttggactcaagacgatagttaccggataaggcgcagcggtcgggctgaacggggggttcgtgcacacagcccagcttggagcgaacgacctacaccgaactgagatacctacagcgtgagctatgagaaagcgccacgcttcccgaagggagaaaggcggacaggtatccggtaagcggcagggtcggaacaggagagcgcacgagggagcttccagggggaaacgcctggtatctttatagtcctgtcgggtttcgccacctctgacttgagcgtcgatttttgtgatgctcgtcaggggggcggagcctatggaaaaacgccagcaacgcggcctttttacggttcctggccttttgctggccttttgctcacatgttctttcctgcgttatcccctgattctgtggataaccgtattaccgcctttgagtgagctgataccgctcgccgcagccgaacgaccgagcgcagcgagtcagtgagcgaggaagcggaagagcgcctgatgcggtattttctccttacgcatctgtgcggtatttcacaccgcatatggtgcactctcagtacaatctgctctgatgccgcatagttaagccagtatacactccgctatcgctacgtgactgggtcatggctgcgccccgacacccgccaacacccgctgacgcgccctgacgggcttgtctgctcccggcatccgcttacagacaagctgtgaccgtctccgggagctgcatgtgtcagaggttttcaccgtcatcaccgaaacgcgcgaggcagctgcggtaaagctcatcagcgtggtcgtgaagcgattcacagatgtctgcctgttcatccgcgtccagctcgttgagtttctccagaagcgttaatgtctggcttctgataaagcgggccatgttaagggcggttttttcctgtttggtcactgatgcctccgtgtaagggggatttctgttcatgggggtaatgataccgatgaaacgagagaggatgctcacgatacgggttactgatgatgaacatgcccggttactggaacgttgtgagggtaaacaactggcggtatggatgcggcgggaccagagaaaaatcactcagggtcaatgccagcgctagcagcacgccatagtgactggcgatgctgtcggaatggacgatatcccgcaagaggcccggcagtaccggcataaccaagcctatgcctacagcatccagggtgacggtgccgaggatgacgatgagcgcattgttagatttcatacacggtgcctgactgcgttagcaatttaactgtgataaactaccgcattaaagctagcttatcgatgcataatgtgcctgtcaaatggacgaagcagggattctgcaaaccctatgctactccgtcaagccgtcaattgtctgattcgttaccaattatgacaacttgacggctacatcattcactttttcttcacaaccggcacggaactcgctcgggctggccccggtgcattttttaaatacccgcgagaaatagagttgatcgtcaaaaccaacattgcgaccgacggtggcgataggcatccgggtggtgctcaaaagcagcttcgcctggctgatacgttggtcctcgcgccagcttaagacgctaatccctaactgctggcggaaaagatgtgacagacgcgacggcgacaagcaaacatgctgtgcgacgctggcgatatcaaaattgctgtctgccaggtgatcgctgatgtactgacaagcctcgcgtacccgattatccatcggtggatggagcgactcgttaatcgcttccatgcgccgcagtaacaattgctcaagcagatttatcgccagcagctccgaatagcgcccttccccttgcccggcgttaatgatttgcccaaacaggtcgctgaaatgcggctggtgcgcttcatccgggcgaaagaaccccgtattggcaaatattgacggccagttaagccattcatgccagtaggcgcgcggacgaaagtaaacccactggtgataccattcgcgagcctccggatgacgaccgtagtgatgaatctctcctggcgggaacagcaaaatatcacccggtcggcaaacaaattctcgtccctgatttttcaccaccccctgaccgcgaatggtgagattgagaatataacctttcattcccagcggtcggtcgataaaaaaatcgagataaccgttggcctcaatcggcgttaaacccgccaccagatgggcattaaacgagtatcccggcagcaggggatcattttgcgcttcagccatacttttcatactcccgccattcagagaagaaaccaattgtccatattgcatcagacattg

SEQ ID NO: 5601 - DNA, 5228 bp, Artificial Sequence
  Description of Artificial Sequence: Synthetic polynucleotide
ctcgggccgtctcttgggcttgatcggccttcttgcgcatctcacgcgctcctgcggcggcctgtagggcaggctcatacccctgccgaaccgcttttgtcagccggtcggccacggcttccggcgtctcaacgcgctttgagattcccagcttttcggccaatccctgcggtgcataggcgcgtggctcgaccgcttgcgggctgatggtgacgtggcccactggtggccgctccagggcctcgtagaacgcctgaatgcgcgtgtgacgtgccttgctgccctcgatgccccgttgcagccctagatcggccacagcggccgcaaacgtggtctggtcgcgggtcatctgcgctttgttgccgatgaactccttggccgacagcctgccgtcctgcgtcagcggcaccacgaacgcggtcatgtgcgggctggtttcgtcacggtggatgctggccgtcacgatgcgatccgccccgtacttgtccgccagccacttgtgcgccttctcgaagaacgccgcctgctgttcttggctggccgacttccaccattccgggctggccgtcatgacgtactcgaccgccaacacagcgtccttgcgccgcttctctggcagcaactcgcgcagtcggcccatcgcttcatcggtgctgctggccgcccagtgctcgttctctggcgtcctgctggcgtcagcgttgggcgtctcgcgctcgcggtaggcgtgcttgagactggccgccacgttgcccattttcgccagcttcttgcatcgcatgatcgcgtatgccgccatgcctgcccctcccttttggtgtccaaccggctcgacgggggcagcgcaaggcggtgcctccggcgggccactcaatgcttgagtatactcactagactttgcttcgcaaagtcgtgaccgcctacggcggctgcggcgccctacgggcttgctctccgggcttcgccctgcgcggtcgctgcgctcccttgccagcccgtggatatgtggacgatggccgcgagcggccaccggctggctcgcttcgctcggcccgtggacaaccctgctggacaagctgatggacaggctgcgcctgcccacgagcttgaccacagggattgcccaccggctacccagccttcgaccacatacccaccggctccaactgcgcggcctgcggccttgccccatcaatttttttaattttctctggggaaaagcctccggcctgcggcctgcgcgcttcgcttgccggttggacaccaagtggaaggcgggtcaaggctcgcgcagcgaccgcgcagcggcttggccttgacgcgcctggaacgacccaagcctatgcgagtgggggcagtcgaaggcgaagcccgcccgcctgccccccgagcctcacggcggcgagtgcgggggttccaagggggcagcgccaccttgggcaaggccgaaggccgcgcagtcgatcaacaagccccggaggggccactttttgccggagggggagccgcgccgaaggcgtgggggaaccccgcaggggtgcccttctttgggcaccaaagaactagatatagggcgaaatgcgaaagacttaaaaatcaacaacttaaaaaaggggggtacgcaacagctcattgcggcaccccccgcaatagctcattgcgtaggttaaagaaaatctgtaattgactgccacttttacgcaacgcataattgttgtcgcgctgccgaaaagttgcagctgattgcgcatggtgccgcaaccgtgcggcaccctaccgcatggagataagcatggccacgcagtccagagaaatcggcattcaagccaagaacaagcccggtcactgggtgcaaacggaacgcaaagcgcatgaggcgtgggccgggcttattgcgaggaaacccacggcggcaatgctgctgcatcacctcgtggcgcagatgggccaccagaacgccgtggtggtcagccagaagacactttccaagctcatcggacgttctttgcggacggtccaatacgcagtcaaggacttggtggccgagcgctggatctccgtcgtgaagctcaacggccccggcaccgtgtcggcctacgtggtcaatgaccgcgtggcgtggggccagccccgcgaccagttgcgcctgtcggtgttcagtgccgccgtggtggttgatcacgacgaccaggacgaatcgctgttggggcatggcgacctgcgccgcatcccgaccctgtatccgggcgagcagcaactaccgaccggccccggcgaggagccgcccagccagcccggcattccgggcatggaaccagacctgccagccttgaccgaaacggaggaatgggaacggcgcgggcagcagcgcctgccgatgcccgatgagccgtgttttctggacgatggcgagccgttggagccgccgacacgggtcacgctgccgcgccggtagcacttgggttgcgcagcaacccgtaagtgcgctgttccagactatcggctgtagccgcctcgccgccctataccttgtctgcctccccgcgttgcgtcgcggtgcatggagccgggccacctcgacctgaatggaagccggcggcacctcgctaacggattcaccgtttttatcaggctctgggaggcagaataaatgatcatatcgtcaattattacctccacggggagagcctgagcaaactggcctcaggcatttgagaagcacacggtcacactgcttccggtagtcaataaaccggtaaaccagcaatagacataagcggctatttaacgaccctgccctgaaccgacgaccgggtcgaatttgctttcgaatttctgccattcatccgcttattatcacttattcaggcgtagcaccaggcgtttaagggcaccaataactgccttaaaaaaattacgccccgccctgccactcatcgcagtcggcctattggttaaaaaatgagctgatttaacaaaaatttaacgcgaattttaacaaaatattaacgcttacaatttccattcgccattcaggctgcgcaactgttgggaagggcgatcggtgcgggcctcttcgctattacgccagctggcgaaagggggatgtgctgcaaggcgattaagttgggtaacgccagggttttcccagtcacgacgttgtaaaacgacggccagtgagcgcgcgtaatacgactcactatagggcgaattggagctccaccgcggtggcggccgctctagaactagtggatcccccgggctgcaggaattcgatatcaagcttatcgataccgtcgacctcgagggggggcccggtacccagcttttgttccctttagtgagggttaattgcgcgcttggcgtaatcatggtcatagctgtttcctgtgtgaaattgttatccgctcacaattccacacaacatacgagccggaagcataaagtgtaaagcctggggtgcctaatgagtgagctaactcacattaattgcgttgcgctcactgcccgctttccagtcgggaaacctgtcgtgccagctgcattaatgaatcggccaacgcgcggggagaggcggtttgcgtattgggcgcatttgcgcattcacagttctccgcaagaattgattggctccaattcttggagtggtgaatccgttagcgaggtgccgccggcttccattcaggtcgaggtggcccggctccatgcaccgcgacgcaacgcggggaggcagacaaggtatagggcggcgcctacaatccatgccaacccgttccatgtgctcgccgaggcggcataaatcgccgtgacgatcagcggtccagtgatcgaagttaggctggtaagagccgcgagcgatccttgaagctgtccctgatggtcgtcatctacctgcctggacagcatggcctgcaacgcgggcatcccgatgccgccggaagcgagaagaatcataatggggaaggccatccagcctcgcgtcgcgaacgccagcaagacgtagcccagcgcgtcggccgccatgccggcgataatggcctgcttctcgccgaaacgtttggtggcgggaccagtgacgaaggcttgagcgagggcgtgcaagattccgaataccgcaagcgacaggccgatcatcgtcgcgctccagcgaaagcggtcctcgccgaaaatgacccagagcgctgccggcacctgtcctacgagttgcatgataaagaagacagtcataagtgcggcgacgatagtcatgccccgcgcccaccggaaggagctgactgggttgaaggctctcaagggcatcggtcgacgctctcccttatgcgactcctgcattaggaagcagcccagtagtaggttgaggccgttgagcaccgccgccgcaaggaatggtgcatgcaaggagatggcgcccaacagtcccccggccacggggcctgccaccatacccacgccgaaacaagcgctcatgagcccgaagtggcgagcccgatcttccccatcggtgatgtcggcgatataggcgccagcaaccgcacctgtggcgccggtgatgccggccacgatgcgtccggcgtagaggatccacaggacgggtgtggtcgccatgatcgcgtagtcgatagtggctccaagtagcgaagcgagcaggactgggcggcggccaaagcggtcggacagtgctccgagaacgggtgcgcatagaaattgcatcaacgcatatagcgctagcagcacgccatagtgactggcgatgctgtcggaatggacgatatcccgcaagaggcccggcagtaccggcataaccaagcctatgcctacagcatccagggtgacggtgccgaggatgacgatgagcgcattgttagatttcatacacggtgcctgactgcgttagcaatttaactgtgataaactaccgcattaaagcttatcgatgataagctgtcaaacatgagaattcttgaagacgaaagggcctcgtgatacgcctatttttataggttaatgtcatgataataatggtttcttagacgtcaggtggcacttttcggggaaatgtgcgcgcccgcgttcctgctggcgctgggcctgtttctggcgctggacttcccgctgttccgtcagcagcttttcgcccacggccttgatgatcgcggcggccttggcctgcatatcccgattcaacggccccagggcgtccagaacgggcttcaggcgctcccgaaggt

SEQ ID NO: 5602 - DNA, 3781 bp, Artificial Sequence
  Description of Artificial Sequence: Synthetic polynucleotide
ggggaattgtgagcggataacaattcccctgtagaaataattttgtttaactttaataaggagatataccatgggcagcagccatcaccatcatcaccacagccaggatccgaattcgagctcggcgcgcctgcaggtcgacaagcttgcggccgcataatgcttaagtcgaacagaaagtaatcgtattgtacacggccgcataatcgaaattaatacgactcactataggggaattgtgagcggataacaattccccatcttagtatattagttaagtataagaaggagatatacatatggcagatctcaattggatatcggccggccacgcgatcgctgacgtcggtaccctcgagtctggtaaagaaaccgctgctgcgaaatttgaacgccagcacatggactcgtctactagcgcagcttaattaacctaggctgctgccaccgctgagcaataactagcataaccccttggggcctctaaacgggtcttgaggggttttttgctgaaacctcaggcatttgagaagcacacggtcacactgcttccggtagtcaataaaccggtaaaccagcaatagacataagcggctatttaacgaccctgccctgaaccgacgaccgggtcatcgtggccggatcttgcggcccctcggcttgaacgaattgttagacattatttgccgactaccttggtgatctcgcctttcacgtagtggacaaattcttccaactgatctgcgcgcgaggccaagcgatcttcttcttgtccaagataagcctgtctagcttcaagtatgacgggctgatactgggccggcaggcgctccattgcccagtcggcagcgacatccttcggcgcgattttgccggttactgcgctgtaccaaatgcgggacaacgtaagcactacatttcgctcatcgccagcccagtcgggcggcgagttccatagcgttaaggtttcatttagcgcctcaaatagatcctgttcaggaaccggatcaaagagttcctccgccgctggacctaccaaggcaacgctatgttctcttgcttttgtcagcaagatagccagatcaatgtcgatcgtggctggctcgaagatacctgcaagaatgtcattgcgctgccattctccaaattgcagttcgcgcttagctggataacgccacggaatgatgtcgtcgtgcacaacaatggtgacttctacagcgcggagaatctcgctctctccaggggaagccgaagtttccaaaaggtcgttgatcaaagctcgccgcgttgtttcatcaagccttacggtcaccgtaaccagcaaatcaatatcactgtgtggcttcaggccgccatccactgcggagccgtacaaatgtacggccagcaacgtcggttcgagatggcgctcgatgacgccaactacctctgatagttgagtcgatacttcggcgatcaccgcttccctcatactcttcctttttcaatattattgaagcatttatcagggttattgtctcatgagcggatacatatttgaatgtatttagaaaaataaacaaatagctagctcactcggtcgctacgctccgggcgtgagactgcggcgggcgctgcggacacatacaaagttacccacagattccgtggataagcaggggactaacatgtgaggcaaaacagcagggccgcgccggtggcgtttttccataggctccgccctcctgccagagttcacataaacagacgcttttccggtgcatctgtgggagccgtgaggctcaaccatgaatctgacagtacgggcgaaacccgacaggacttaaagatccccaccgtttccggcgggtcgctccctcttgcgctctcctgttccgaccctgccgtttaccggatacctgttccgcctttctcccttacgggaagtgtggcgctttctcatagctcacacactggtatctcggctcggtgtaggtcgttcgctccaagctgggctgtaagcaagaactccccgttcagcccgactgctgcgccttatccggtaactgttcacttgagtccaacccggaaaagcacggtaaaacgccactggcagcagccattggtaactgggagttcgcagaggatttgtttagctaaacacgcggttgctcttgaagtgtgcgccaaagtccggctacactggaaggacagatttggttgctgtgctctgcgaaagccagttaccacggttaagcagttccccaactgacttaaccttcgatcaaaccacctccccaggtggttttttcgtttacagggcaaaagattacgcgcagaaaaaaaggatctcaagaagatcctttgatcttttctactgaaccgctctagatttcagtgcaatttatctcttcaaatgtagcacctgaagtcagccccatacgatataagttgtaattctcatgttagtcatgccccgcgcccaccggaaggagctgactgggttgaaggctctcaagggcatcggtcgagatcccggtgcctaatgagtgagctaacttacattaattgcgttgcgctcactgcccgctttccagtcgggaaacctgtcgtgccagctgcattaatgaatcggccaacgcgcggggagaggcggtttgcgtattgggcgccagggtggtttttcttttcaccagtgagacgggcaacagctgattgcccttcaccgcctggccctgagagagttgcagcaagcggtccacgctggtttgccccagcaggcgaaaatcctgtttgatggtggttaacggcgggatataacatgagctgtcttcggtatcgtcgtatcccactaccgagatgtccgcaccaacgcgcagcccggactcggtaatggcgcgcattgcgcccagcgccatctgatcgttggcaaccagcatcgcagtgggaacgatgccctcattcagcatttgcatggtttgttgaaaaccggacatggcactccagtcgccttcccgttccgctatcggctgaatttgattgcgagtgagatatttatgccagccagccagacgcagacgcgccgagacagaacttaatgggcccgctaacagcgcgatttgctggtgacccaatgcgaccagatgctccacgcccagtcgcgtaccgtcttcatgggagaaaataatactgttgatgggtgtctggtcagagacatcaagaaataacgccggaacattagtgcaggcagcttccacagcaatggcatcctggtcatccagcggatagttaatgatcagcccactgacgcgttgcgcgagaagattgtgcaccgccgctttacaggcttcgacgccgcttcgttctaccatcgacaccaccacgctggcacccagttgatcggcgcgagatttaatcgccgcgacaatttgcgacggcgcgtgcagggccagactggaggtggcaacgccaatcagcaacgactgtttgcccgccagttgttgtgccacgcggttgggaatgtaattcagctccgccatcgccgcttccactttttcccgcgttttcgcagaaacgtggctggcctggttcaccacgcgggaaacggtctgataagagacaccggcatactctgcgacatcgtataacgttactggtttcacattcaccaccctgaattgactctcttccgggcgctatcatgccataccgcgaaaggttttgcgccattcgatggtgtccgggatctcgacgctctcccttatgcgactcctgcattaggaaattaatacgactcactata

SEQ ID NO: 5603 - DNA, 3970 bp, Artificial Sequence
  Description of Artificial Sequence: Synthetic polynucleotide
cctgtcaaatggacgaagcagggattctgcaaaccctatgctactccgtcaagccgtcaattgtctgattcgttaccaattatgacaacttgacggctacatcattcactttttcttcacaaccggcacggaactcgctcgggctggccccggtgcattttttaaatacccgcgagaaatagagttgatcgtcaaaaccaacattgcgaccgacggtggcgataggcatccgggtggtgctcaaaagcagcttcgcctggctgatacgttggtcctcgcgccagcttaagacgctaatccctaactgctggcggaaaagatgtgacagacgcgacggcgacaagcaaacatgctgtgcgacgctggcgatatcaaaattgctgtctgccaggtgatcgctgatgtactgacaagcctcgcgtacccgattatccatcggtggatggagcgactcgttaatcgcttccatgcgccgcagtaacaattgctcaagcagatttatcgccagcagctccgaatagcgcccttccccttgcccggcgttaatgatttgcccaaacaggtcgctgaaatgcggctggtgcgcttcatccgggcgaaagaaccccgtattggcaaatattgacggccagttaagccattcatgccagtaggcgcgcggacgaaagtaaacccactggtgataccattcgcgagcctccggatgacgaccgtagtgatgaatctctcctggcgggaacagcaaaatatcacccggtcggcaaacaaattctcgtccctgatttttcaccaccccctgaccgcgaatggtgagattgagaatataacctttcattcccagcggtcggtcgataaaaaaatcgagataaccgttggcctcaatcggcgttaaacccgccaccagatgggcattaaacgagtatcccggcagcaggggatcattttgcgcttcagccatacttttcatactcccgccattcagagaagaaaccaattgtccatattgcatcagacattgccgtcactgcgtcttttactggctcttctcgctaaccaaaccggtaaccccgcttattaaaagcattctgtaacaaagcgggaccaaagccatgacaaaaacgcgtaacaaaagtgtctataatcacggcagaaaagtccacattgattatttgcacggcgtcacactttgctatgccatagcatttttatccataagattagcggatcctacctgacgctttttatcgcaactctctactgtttctccatacccgtttttttgggctagcgaattcgagctcggtacccggggatcctctagagtcgacctgcaggcatgcaagcttggctgttttggcggatgagagaagattttcagcctgatacagattaaatcagaacgcagaagcggtctgataaaacagaatttgcctggcggcagtagcgcggtggtcccacctgaccccatgccgaactcagaagtgaaacgccgtagcgccgatggtagtgtggggtctccccatgcgagagtagggaactgccaggcatcaaataaaacgaaaggctcagtcgaaagactgggcctttcgttttatctgttgtttgtcggtgaacgctctcctgagtaggacaaatccgccgggagcggatttgaacgttgcgaagcaacggcccggagggtggcgggcaggacgcccgccataaactgccaggcatcaaattaagcagaaggccatcctgacggatggcctttttgcgtttctacaaactcttttgtttatttttctaaatacattcaaatatgtatccgctcatgagaacctataaaaataggcgtatcacgaggccctttcgtcttcaagaattctcatgtttgacagcttatcatcgataagctttaatgcggtagtttatcacagttaaattgctaacgcagtcaggcaccgtgtatgaaatctaacaatgcgctcatcgtcatcctcggcaccgtcaccctggatgctgtaggcataggcttggttatgccggtactgccgggcctcttgcgggatatcgtccattccgacagcatcgccagtcactatggcgtgctgctagcgctatatgcgttgatgcaatttctatgcgcacccgttctcggagcactgtccgaccgctttggccgccgcccagtcctgctcgcttcgctacttggagccactatcgactacgcgatcatggcgaccacacccgtcctgtggatcctctacgccggacgcatcgtggccggcatcaccggcgccacaggtgcggttgctggcgcctatatcgccgacatcaccgatggggaagatcgggctcgccacttcgggctcatgagcgcttgtttcggcgtgggtatggtggcaggccccgtggccgggggactgttgggcgccatctccttgcatgcaccattccttgcggcggcggtgctcaacggcctcaacctactactgggctgcttcctaatgcaggagtcgcataagggagagcgtcgaccgatgcccttgagagccttcaacccagtcagctccttccggtgggcgcggggcatgactatcgtcgccgcacttatgactgtcttctttatcatgcaactcgtaggacaggtgccggcagcgctctgggtcattttcggcgaggaccgctttcgctggagcgcgacgatgatcggcctgtcgcttgcggtattcggaatcttgcacgccctcgctcaagccttcgtcactggtcccgccaccaaacgtttcggcgagaagcaggccattatcgccggcatggcggccgacgcgctgggctacgtcttgctggcgttcgcgacgcgaggctggatggccttccccattatgattcttctcgcttccggcggcatcgggatgcccgcgttgcaggccatgctgtccaggcaggtagatgacgaccatcagggacagcttcaaggatcgctcgcggctcttaccagcctaacttcgatcactggaccgctgatcgtcacggcgatttatgccgcctcggcgagcacatggaacgggttggcatggattgtaggcgccgccctataccttgtctgcctccccgcgttgcgtcgcggtgcatggagccgggccacctcgacctgaatggaagccggcggcacctcgctaacggattcaccactccaagaattggagccaatcaattcgcgctgcggacacatacaaagttacccacagattccgtggataagcaggggactaacatgtgaggcaaaacagcagggccgcgccggtggcgtttttccataggctccgccctcctgccagagttcacataaacagacgcttttccggtgcatctgtgggagccgtgaggctcaaccatgaatctgacagtacgggcgaaacccgacaggacttaaagatccccaccgtttccggcgggtcgctccctcttgcgctctcctgttccgaccctgccgtttaccggatacctgttccgcctttctcccttacgggaagtgtggcgctttctcatagctcacacactggtatctcggctcggtgtaggtcgttcgctccaagctgggctgtaagcaagaactccccgttcagcccgactgctgcgccttatccggtaactgttcacttgagtccaacccggaaaagcacggtaaaacgccactggcagcagccattggtaactgggagttcgcagaggatttgtttagctaaacacgcggttgctcttgaagtgtgcgccaaagtccggctacactggaaggacagatttggttgctgtgctctgcgaaagccagttaccacggttaagcagttccccaactgacttaaccttcgatcaaaccacctccccaggtggttttttcgtttacagggcaaaagattacgcgcagaaaaaaaggatctcaagaagatcctttgatcttttctactgaaccgctctagatttcagt

SEQ ID NO: 5604 - DNA, 3834 bp, Artificial Sequence
  Description of Artificial Sequence: Synthetic polynucleotide
cctgtcaaatggacgaagcagggattctgcaaaccctatgctactccgtcaagccgtcaattgtctgattcgttaccaattatgacaacttgacggctacatcattcactttttcttcacaaccggcacggaactcgctcgggctggccccggtgcattttttaaatacccgcgagaaatagagttgatcgtcaaaaccaacattgcgaccgacggtggcgataggcatccgggtggtgctcaaaagcagcttcgcctggctgatacgttggtcctcgcgccagcttaagacgctaatccctaactgctggcggaaaagatgtgacagacgcgacggcgacaagcaaacatgctgtgcgacgctggcgatatcaaaattgctgtctgccaggtgatcgctgatgtactgacaagcctcgcgtacccgattatccatcggtggatggagcgactcgttaatcgcttccatgcgccgcagtaacaattgctcaagcagatttatcgccagcagctccgaatagcgcccttccccttgcccggcgttaatgatttgcccaaacaggtcgctgaaatgcggctggtgcgcttcatccgggcgaaagaaccccgtattggcaaatattgacggccagttaagccattcatgccagtaggcgcgcggacgaaagtaaacccactggtgataccattcgcgagcctccggatgacgaccgtagtgatgaatctctcctggcgggaacagcaaaatatcacccggtcggcaaacaaattctcgtccctgatttttcaccaccccctgaccgcgaatggtgagattgagaatataacctttcattcccagcggtcggtcgataaaaaaatcgagataaccgttggcctcaatcggcgttaaacccgccaccagatgggcattaaacgagtatcccggcagcaggggatcattttgcgcttcagccatacttttcatactcccgccattcagagaagaaaccaattgtccatattgcatcagacattgccgtcactgcgtcttttactggctcttctcgctaaccaaaccggtaaccccgcttattaaaagcattctgtaacaaagcgggaccaaagccatgacaaaaacgcgtaacaaaagtgtctataatcacggcagaaaagtccacattgattatttgcacggcgtcacactttgctatgccatagcatttttatccataagattagcggatcctacctgacgctttttatcgcaactctctactgtttctccatacccgtttttttgggctagcgaattcgagctcggtacccgggtgaactgccgagtaggtagctgataaccgagaccgctggtctccgtgaactgccgagtaggtagctgataacccatgcgagagtagggaactgccaggcatcaaataaaacgaaaggctcagtcgaaagactgggcctttcgttttatctgttgtttgtcggtgaacgctctcctgagtaggacaaatccgccgggagcggatttgaacgttgcgaagcaacggcccggagggtggcgggcaggacgcccgccataaactgccaggcatcaaattaagcagaaggccatcctgacggatggcctttttgcgtttctacaaactcttttgtttatttttctaaatacattcaaatatgtatccgctcatgagaacctataaaaataggcgtatcacgaggccctttcgtcttcaagaattctcatgtttgacagcttatcatcgataagctttaatgcggtagtttatcacagttaaattgctaacgcagtcaggcaccgtgtatgaaatctaacaatgcgctcatcgtcatcctcggcaccgtcaccctggatgctgtaggcataggcttggttatgccggtactgccgggcctcttgcgggatatcgtccattccgacagcatcgccagtcactatggcgtgctgctagcgctatatgcgttgatgcaatttctatgcgcacccgttctcggagcactgtccgaccgctttggccgccgcccagtcctgctcgcttcgctacttggagccactatcgactacgcgatcatggcgaccacacccgtcctgtggatcctctacgccggacgcatcgtggccggcatcaccggcgccacaggtgcggttgctggcgcctatatcgccgacatcaccgatggggaagatcgggctcgccacttcgggctcatgagcgcttgtttcggcgtgggtatggtggcaggccccgtggccgggggactgttgggcgccatctccttgcatgcaccattccttgcggcggcggtgctcaacggcctcaacctactactgggctgcttcctaatgcaggagtcgcataagggagagcgtcgaccgatgcccttgagagccttcaacccagtcagctccttccggtgggcgcggggcatgactatcgtcgccgcacttatgactgtcttctttatcatgcaactcgtaggacaggtgccggcagcgctctgggtcattttcggcgaggaccgctttcgctggagcgcgacgatgatcggcctgtcgcttgcggtattcggaatcttgcacgccctcgctcaagccttcgtcactggtcccgccaccaaacgtttcggcgagaagcaggccattatcgccggcatggcggccgacgcgctgggctacgtcttgctggcgttcgcgacgcgaggctggatggccttccccattatgattcttctcgcttccggcggcatcgggatgcccgcgttgcaggccatgctgtccaggcaggtagatgacgaccatcagggacagcttcaaggatcgctcgcggctcttaccagcctaacttcgatcactggaccgctgatcgtcacggcgatttatgccgcctcggcgagcacatggaacgggttggcatggattgtaggcgccgccctataccttgtctgcctccccgcgttgcgtcgcggtgcatggagccgggccacctcgacctgaatggaagccggcggcacctcgctaacggattcaccactccaagaattggagccaatcaattcgcgctgcggacacatacaaagttacccacagattccgtggataagcaggggactaacatgtgaggcaaaacagcagggccgcgccggtggcgtttttccataggctccgccctcctgccagagttcacataaacagacgcttttccggtgcatctgtgggagccgtgaggctcaaccatgaatctgacagtacgggcgaaacccgacaggacttaaagatccccaccgtttccggcgggtcgctccctcttgcgctctcctgttccgaccctgccgtttaccggatacctgttccgcctttctcccttacgggaagtgtggcgctttctcatagctcacacactggtatctcggctcggtgtaggtcgttcgctccaagctgggctgtaagcaagaactccccgttcagcccgactgctgcgccttatccggtaactgttcacttgagtccaacccggaaaagcacggtaaaacgccactggcagcagccattggtaactgggagttcgcagaggatttgtttagctaaacacgcggttgctcttgaagtgtgcgccaaagtccggctacactggaaggacagatttggttgctgtgctctgcgaaagccagttaccacggttaagcagttccccaactgacttaaccttcgatcaaaccacctccccaggtggttttttcgtttacagggcaaaagattacgcgcagaaaaaaaggatctcaagaagatcctttgatcttttctactgaaccgctctagatttcagt

SEQ ID NO: 5605 - DNA, 3849 bp, Artificial Sequence
  Description of Artificial Sequence: Synthetic polynucleotide
cctgtcaaatggacgaagcagggattctgcaaaccctatgctactccgtcaagccgtcaattgtctgattcgttaccaattatgacaacttgacggctacatcattcactttttcttcacaaccggcacggaactcgctcgggctggccccggtgcattttttaaatacccgcgagaaatagagttgatcgtcaaaaccaacattgcgaccgacggtggcgataggcatccgggtggtgctcaaaagcagcttcgcctggctgatacgttggtcctcgcgccagcttaagacgctaatccctaactgctggcggaaaagatgtgacagacgcgacggcgacaagcaaacatgctgtgcgacgctggcgatatcaaaattgctgtctgccaggtgatcgctgatgtactgacaagcctcgcgtacccgattatccatcggtggatggagcgactcgttaatcgcttccatgcgccgcagtaacaattgctcaagcagatttatcgccagcagctccgaatagcgcccttccccttgcccggcgttaatgatttgcccaaacaggtcgctgaaatgcggctggtgcgcttcatccgggcgaaagaaccccgtattggcaaatattgacggccagttaagccattcatgccagtaggcgcgcggacgaaagtaaacccactggtgataccattcgcgagcctccggatgacgaccgtagtgatgaatctctcctggcgggaacagcaaaatatcacccggtcggcaaacaaattctcgtccctgatttttcaccaccccctgaccgcgaatggtgagattgagaatataacctttcattcccagcggtcggtcgataaaaaaatcgagataaccgttggcctcaatcggcgttaaacccgccaccagatgggcattaaacgagtatcccggcagcaggggatcattttgcgcttcagccatacttttcatactcccgccattcagagaagaaaccaattgtccatattgcatcagacattgccgtcactgcgtcttttactggctcttctcgctaaccaaaccggtaaccccgcttattaaaagcattctgtaacaaagcgggaccaaagccatgacaaaaacgcgtaacaaaagtgtctataatcacggcagaaaagtccacattgattatttgcacggcgtcacactttgctatgccatagcatttttatccataagattagcggatcctacctgacgctttttatcgcaactctctactgtttctccatacccgtttttttgggctagcgaattcgagctcggtacccgggtgaactgccgagtaggtagctgataacaaacgaaccaccttcattcgagtacaagagcagtgaactgccgagtaggtagctgataacccatgcgagagtagggaactgccaggcatcaaataaaacgaaaggctcagtcgaaagactgggcctttcgttttatctgttgtttgtcggtgaacgctctcctgagtaggacaaatccgccgggagcggatttgaacgttgcgaagcaacggcccggagggtggcgggcaggacgcccgccataaactgccaggcatcaaattaagcagaaggccatcctgacggatggcctttttgcgtttctacaaactcttttgtttatttttctaaatacattcaaatatgtatccgctcatgagaacctataaaaataggcgtatcacgaggccctttcgtcttcaagaattctcatgtttgacagcttatcatcgataagctttaatgcggtagtttatcacagttaaattgctaacgcagtcaggcaccgtgtatgaaatctaacaatgcgctcatcgtcatcctcggcaccgtcaccctggatgctgtaggcataggcttggttatgccggtactgccgggcctcttgcgggatatcgtccattccgacagcatcgccagtcactatggcgtgctgctagcgctatatgcgttgatgcaatttctatgcgcacccgttctcggagcactgtccgaccgctttggccgccgcccagtcctgctcgcttcgctacttggagccactatcgactacgcgatcatggcgaccacacccgtcctgtggatcctctacgccggacgcatcgtggccggcatcaccggcgccacaggtgcggttgctggcgcctatatcgccgacatcaccgatggggaagatcgggctcgccacttcgggctcatgagcgcttgtttcggcgtgggtatggtggcaggccccgtggccgggggactgttgggcgccatctccttgcatgcaccattccttgcggcggcggtgctcaacggcctcaacctactactgggctgcttcctaatgcaggagtcgcataagggagagcgtcgaccgatgcccttgagagccttcaacccagtcagctccttccggtgggcgcggggcatgactatcgtcgccgcacttatgactgtcttctttatcatgcaactcgtaggacaggtgccggcagcgctctgggtcattttcggcgaggaccgctttcgctggagcgcgacgatgatcggcctgtcgcttgcggtattcggaatcttgcacgccctcgctcaagccttcgtcactggtcccgccaccaaacgtttcggcgagaagcaggccattatcgccggcatggcggccgacgcgctgggctacgtcttgctggcgttcgcgacgcgaggctggatggccttccccattatgattcttctcgcttccggcggcatcgggatgcccgcgttgcaggccatgctgtccaggcaggtagatgacgaccatcagggacagcttcaaggatcgctcgcggctcttaccagcctaacttcgatcactggaccgctgatcgtcacggcgatttatgccgcctcggcgagcacatggaacgggttggcatggattgtaggcgccgccctataccttgtctgcctccccgcgttgcgtcgcggtgcatggagccgggccacctcgacctgaatggaagccggcggcacctcgctaacggattcaccactccaagaattggagccaatcaattcgcgctgcggacacatacaaagttacccacagattccgtggataagcaggggactaacatgtgaggcaaaacagcagggccgcgccggtggcgtttttccataggctccgccctcctgccagagttcacataaacagacgcttttccggtgcatctgtgggagccgtgaggctcaaccatgaatctgacagtacgggcgaaacccgacaggacttaaagatccccaccgtttccggcgggtcgctccctcttgcgctctcctgttccgaccctgccgtttaccggatacctgttccgcctttctcccttacgggaagtgtggcgctttctcatagctcacacactggtatctcggctcggtgtaggtcgttcgctccaagctgggctgtaagcaagaactccccgttcagcccgactgctgcgccttatccggtaactgttcacttgagtccaacccggaaaagcacggtaaaacgccactggcagcagccattggtaactgggagttcgcagaggatttgtttagctaaacacgcggttgctcttgaagtgtgcgccaaagtccggctacactggaaggacagatttggttgctgtgctctgcgaaagccagttaccacggttaagcagttccccaactgacttaaccttcgatcaaaccacctccccaggtggttttttcgtttacagggcaaaagattacgcgcagaaaaaaaggatctcaagaagatcctttgatcttttctactgaaccgctctagatttcagt

SEQ ID NO: 5606 - DNA, 3849 bp, Artificial Sequence
  Description of Artificial Sequence: Synthetic polynucleotide
cctgtcaaatggacgaagcagggattctgcaaaccctatgctactccgtcaagccgtcaattgtctgattcgttaccaattatgacaacttgacggctacatcattcactttttcttcacaaccggcacggaactcgctcgggctggccccggtgcattttttaaatacccgcgagaaatagagttgatcgtcaaaaccaacattgcgaccgacggtggcgataggcatccgggtggtgctcaaaagcagcttcgcctggctgatacgttggtcctcgcgccagcttaagacgctaatccctaactgctggcggaaaagatgtgacagacgcgacggcgacaagcaaacatgctgtgcgacgctggcgatatcaaaattgctgtctgccaggtgatcgctgatgtactgacaagcctcgcgtacccgattatccatcggtggatggagcgactcgttaatcgcttccatgcgccgcagtaacaattgctcaagcagatttatcgccagcagctccgaatagcgcccttccccttgcccggcgttaatgatttgcccaaacaggtcgctgaaatgcggctggtgcgcttcatccgggcgaaagaaccccgtattggcaaatattgacggccagttaagccattcatgccagtaggcgcgcggacgaaagtaaacccactggtgataccattcgcgagcctccggatgacgaccgtagtgatgaatctctcctggcgggaacagcaaaatatcacccggtcggcaaacaaattctcgtccctgatttttcaccaccccctgaccgcgaatggtgagattgagaatataacctttcattcccagcggtcggtcgataaaaaaatcgagataaccgttggcctcaatcggcgttaaacccgccaccagatgggcattaaacgagtatcccggcagcaggggatcattttgcgcttcagccatacttttcatactcccgccattcagagaagaaaccaattgtccatattgcatcagacattgccgtcactgcgtcttttactggctcttctcgctaaccaaaccggtaaccccgcttattaaaagcattctgtaacaaagcgggaccaaagccatgacaaaaacgcgtaacaaaagtgtctataatcacggcagaaaagtccacattgattatttgcacggcgtcacactttgctatgccatagcatttttatccataagattagcggatcctacctgacgctttttatcgcaactctctactgtttctccatacccgtttttttgggctagcgaattcgagctcggtacccgggtgaactgccgagtaggtagctgataacaagcgtacaacgtttatccgagttcaagagcagtgaactgccgagtaggtagctgataacccatgcgagagtagggaactgccaggcatcaaataaaacgaaaggctcagtcgaaagactgggcctttcgttttatctgttgtttgtcggtgaacgctctcctgagtaggacaaatccgccgggagcggatttgaacgttgcgaagcaacggcccggagggtggcgggcaggacgcccgccataaactgccaggcatcaaattaagcagaaggccatcctgacggatggcctttttgcgtttctacaaactcttttgtttatttttctaaatacattcaaatatgtatccgctcatgagaacctataaaaataggcgtatcacgaggccctttcgtcttcaagaattctcatgtttgacagcttatcatcgataagctttaatgcggtagtttatcacagttaaattgctaacgcagtcaggcaccgtgtatgaaatctaacaatgcgctcatcgtcatcctcggcaccgtcaccctggatgctgtaggcataggcttggttatgccggtactgccgggcctcttgcgggatatcgtccattccgacagcatcgccagtcactatggcgtgctgctagcgctatatgcgttgatgcaatttctatgcgcacccgttctcggagcactgtccgaccgctttggccgccgcccagtcctgctcgcttcgctacttggagccactatcgactacgcgatcatggcgaccacacccgtcctgtggatcctctacgccggacgcatcgtggccggcatcaccggcgccacaggtgcggttgctggcgcctatatcgccgacatcaccgatggggaagatcgggctcgccacttcgggctcatgagcgcttgtttcggcgtgggtatggtggcaggccccgtggccgggggactgttgggcgccatctccttgcatgcaccattccttgcggcggcggtgctcaacggcctcaacctactactgggctgcttcctaatgcaggagtcgcataagggagagcgtcgaccgatgcccttgagagccttcaacccagtcagctccttccggtgggcgcggggcatgactatcgtcgccgcacttatgactgtcttctttatcatgcaactcgtaggacaggtgccggcagcgctctgggtcattttcggcgaggaccgctttcgctggagcgcgacgatgatcggcctgtcgcttgcggtattcggaatcttgcacgccctcgctcaagccttcgtcactggtcccgccaccaaacgtttcggcgagaagcaggccattatcgccggcatggcggccgacgcgctgggctacgtcttgctggcgttcgcgacgcgaggctggatggccttccccattatgattcttctcgcttccggcggcatcgggatgcccgcgttgcaggccatgctgtccaggcaggtagatgacgaccatcagggacagcttcaaggatcgctcgcggctcttaccagcctaacttcgatcactggaccgctgatcgtcacggcgatttatgccgcctcggcgagcacatggaacgggttggcatggattgtaggcgccgccctataccttgtctgcctccccgcgttgcgtcgcggtgcatggagccgggccacctcgacctgaatggaagccggcggcacctcgctaacggattcaccactccaagaattggagccaatcaattcgcgctgcggacacatacaaagttacccacagattccgtggataagcaggggactaacatgtgaggcaaaacagcagggccgcgccggtggcgtttttccataggctccgccctcctgccagagttcacataaacagacgcttttccggtgcatctgtgggagccgtgaggctcaaccatgaatctgacagtacgggcgaaacccgacaggacttaaagatccccaccgtttccggcgggtcgctccctcttgcgctctcctgttccgaccctgccgtttaccggatacctgttccgcctttctcccttacgggaagtgtggcgctttctcatagctcacacactggtatctcggctcggtgtaggtcgttcgctccaagctgggctgtaagcaagaactccccgttcagcccgactgctgcgccttatccggtaactgttcacttgagtccaacccggaaaagcacggtaaaacgccactggcagcagccattggtaactgggagttcgcagaggatttgtttagctaaacacgcggttgctcttgaagtgtgcgccaaagtccggctacactggaaggacagatttggttgctgtgctctgcgaaagccagttaccacggttaagcagttccccaactgacttaaccttcgatcaaaccacctccccaggtggttttttcgtttacagggcaaaagattacgcgcagaaaaaaaggatctcaagaagatcctttgatcttttctactgaaccgctctagatttcagt

SEQ ID NO: 5607 - DNA, 3849 bp, Artificial Sequence
  Description of Artificial Sequence: Synthetic polynucleotide
cctgtcaaatggacgaagcagggattctgcaaaccctatgctactccgtcaagccgtcaattgtctgattcgttaccaattatgacaacttgacggctacatcattcactttttcttcacaaccggcacggaactcgctcgggctggccccggtgcattttttaaatacccgcgagaaatagagttgatcgtcaaaaccaacattgcgaccgacggtggcgataggcatccgggtggtgctcaaaagcagcttcgcctggctgatacgttggtcctcgcgccagcttaagacgctaatccctaactgctggcggaaaagatgtgacagacgcgacggcgacaagcaaacatgctgtgcgacgctggcgatatcaaaattgctgtctgccaggtgatcgctgatgtactgacaagcctcgcgtacccgattatccatcggtggatggagcgactcgttaatcgcttccatgcgccgcagtaacaattgctcaagcagatttatcgccagcagctccgaatagcgcccttccccttgcccggcgttaatgatttgcccaaacaggtcgctgaaatgcggctggtgcgcttcatccgggcgaaagaaccccgtattggcaaatattgacggccagttaagccattcatgccagtaggcgcgcggacgaaagtaaacccactggtgataccattcgcgagcctccggatgacgaccgtagtgatgaatctctcctggcgggaacagcaaaatatcacccggtcggcaaacaaattctcgtccctgatttttcaccaccccctgaccgcgaatggtgagattgagaatataacctttcattcccagcggtcggtcgataaaaaaatcgagataaccgttggcctcaatcggcgttaaacccgccaccagatgggcattaaacgagtatcccggcagcaggggatcattttgcgcttcagccatacttttcatactcccgccattcagagaagaaaccaattgtccatattgcatcagacattgccgtcactgcgtcttttactggctcttctcgctaaccaaaccggtaaccccgcttattaaaagcattctgtaacaaagcgggaccaaagccatgacaaaaacgcgtaacaaaagtgtctataatcacggcagaaaagtccacattgattatttgcacggcgtcacactttgctatgccatagcatttttatccataagattagcggatcctacctgacgctttttatcgcaactctctactgtttctccatacccgtttttttgggctagcgaattcgagctcggtacccgggtgaactgccgagtaggtagctgataactacgggtaacagtttctttatggcagggtgaagtgaactgccgagtaggtagctgataacccatgcgagagtagggaactgccaggcatcaaataaaacgaaaggctcagtcgaaagactgggcctttcgttttatctgttgtttgtcggtgaacgctctcctgagtaggacaaatccgccgggagcggatttgaacgttgcgaagcaacggcccggagggtggcgggcaggacgcccgccataaactgccaggcatcaaattaagcagaaggccatcctgacggatggcctttttgcgtttctacaaactcttttgtttatttttctaaatacattcaaatatgtatccgctcatgagaacctataaaaataggcgtatcacgaggccctttcgtcttcaagaattctcatgtttgacagcttatcatcgataagctttaatgcggtagtttatcacagttaaattgctaacgcagtcaggcaccgtgtatgaaatctaacaatgcgctcatcgtcatcctcggcaccgtcaccctggatgctgtaggcataggcttggttatgccggtactgccgggcctcttgcgggatatcgtccattccgacagcatcgccagtcactatggcgtgctgctagcgctatatgcgttgatgcaatttctatgcgcacccgttctcggagcactgtccgaccgctttggccgccgcccagtcctgctcgcttcgctacttggagccactatcgactacgcgatcatggcgaccacacccgtcctgtggatcctctacgccggacgcatcgtggccggcatcaccggcgccacaggtgcggttgctggcgcctatatcgccgacatcaccgatggggaagatcgggctcgccacttcgggctcatgagcgcttgtttcggcgtgggtatggtggcaggccccgtggccgggggactgttgggcgccatctccttgcatgcaccattccttgcggcggcggtgctcaacggcctcaacctactactgggctgcttcctaatgcaggagtcgcataagggagagcgtcgaccgatgcccttgagagccttcaacccagtcagctccttccggtgggcgcggggcatgactatcgtcgccgcacttatgactgtcttctttatcatgcaactcgtaggacaggtgccggcagcgctctgggtcattttcggcgaggaccgctttcgctggagcgcgacgatgatcggcctgtcgcttgcggtattcggaatcttgcacgccctcgctcaagccttcgtcactggtcccgccaccaaacgtttcggcgagaagcaggccattatcgccggcatggcggccgacgcgctgggctacgtcttgctggcgttcgcgacgcgaggctggatggccttccccattatgattcttctcgcttccggcggcatcgggatgcccgcgttgcaggccatgctgtccaggcaggtagatgacgaccatcagggacagcttcaaggatcgctcgcggctcttaccagcctaacttcgatcactggaccgctgatcgtcacggcgatttatgccgcctcggcgagcacatggaacgggttggcatggattgtaggcgccgccctataccttgtctgcctccccgcgttgcgtcgcggtgcatggagccgggccacctcgacctgaatggaagccggcggcacctcgctaacggattcaccactccaagaattggagccaatcaattcgcgctgcggacacatacaaagttacccacagattccgtggataagcaggggactaacatgtgaggcaaaacagcagggccgcgccggtggcgtttttccataggctccgccctcctgccagagttcacataaacagacgcttttccggtgcatctgtgggagccgtgaggctcaaccatgaatctgacagtacgggcgaaacccgacaggacttaaagatccccaccgtttccggcgggtcgctccctcttgcgctctcctgttccgaccctgccgtttaccggatacctgttccgcctttctcccttacgggaagtgtggcgctttctcatagctcacacactggtatctcggctcggtgtaggtcgttcgctccaagctgggctgtaagcaagaactccccgttcagcccgactgctgcgccttatccggtaactgttcacttgagtccaacccggaaaagcacggtaaaacgccactggcagcagccattggtaactgggagttcgcagaggatttgtttagctaaacacgcggttgctcttgaagtgtgcgccaaagtccggctacactggaaggacagatttggttgctgtgctctgcgaaagccagttaccacggttaagcagttccccaactgacttaaccttcgatcaaaccacctccccaggtggttttttcgtttacagggcaaaagattacgcgcagaaaaaaaggatctcaagaagatcctttgatcttttctactgaaccgctctagatttcagt

SEQ ID NO: 5608 - DNA, 3849 bp, Artificial Sequence
  Description of Artificial Sequence: Synthetic polynucleotide
cctgtcaaatggacgaagcagggattctgcaaaccctatgctactccgtcaagccgtcaattgtctgattcgttaccaattatgacaacttgacggctacatcattcactttttcttcacaaccggcacggaactcgctcgggctggccccggtgcattttttaaatacccgcgagaaatagagttgatcgtcaaaaccaacattgcgaccgacggtggcgataggcatccgggtggtgctcaaaagcagcttcgcctggctgatacgttggtcctcgcgccagcttaagacgctaatccctaactgctggcggaaaagatgtgacagacgcgacggcgacaagcaaacatgctgtgcgacgctggcgatatcaaaattgctgtctgccaggtgatcgctgatgtactgacaagcctcgcgtacccgattatccatcggtggatggagcgactcgttaatcgcttccatgcgccgcagtaacaattgctcaagcagatttatcgccagcagctccgaatagcgcccttccccttgcccggcgttaatgatttgcccaaacaggtcgctgaaatgcggctggtgcgcttcatccgggcgaaagaaccccgtattggcaaatattgacggccagttaagccattcatgccagtaggcgcgcggacgaaagtaaacccactggtgataccattcgcgagcctccggatgacgaccgtagtgatgaatctctcctggcgggaacagcaaaatatcacccggtcggcaaacaaattctcgtccctgatttttcaccaccccctgaccgcgaatggtgagattgagaatataacctttcattcccagcggtcggtcgataaaaaaatcgagataaccgttggcctcaatcggcgttaaacccgccaccagatgggcattaaacgagtatcccggcagcaggggatcattttgcgcttcagccatacttttcatactcccgccattcagagaagaaaccaattgtccatattgcatcagacattgccgtcactgcgtcttttactggctcttctcgctaaccaaaccggtaaccccgcttattaaaagcattctgtaacaaagcgggaccaaagccatgacaaaaacgcgtaacaaaagtgtctataatcacggcagaaaagtccacattgattatttgcacggcgtcacactttgctatgccatagcatttttatccataagattagcggatcctacctgacgctttttatcgcaactctctactgtttctccatacccgtttttttgggctagcgaattcgagctcggtacccgggtgaactgccgagtaggtagctgataacacagcggatggttcggataatgcgaacagcgcgtgaactgccgagtaggtagctgataacccatgcgagagtagggaactgccaggcatcaaataaaacgaaaggctcagtcgaaagactgggcctttcgttttatctgttgtttgtcggtgaacgctctcctgagtaggacaaatccgccgggagcggatttgaacgttgcgaagcaacggcccggagggtggcgggcaggacgcccgccataaactgccaggcatcaaattaagcagaaggccatcctgacggatggcctttttgcgtttctacaaactcttttgtttatttttctaaatacattcaaatatgtatccgctcatgagaacctataaaaataggcgtatcacgaggccctttcgtcttcaagaattctcatgtttgacagcttatcatcgataagctttaatgcggtagtttatcacagttaaattgctaacgcagtcaggcaccgtgtatgaaatctaacaatgcgctcatcgtcatcctcggcaccgtcaccctggatgctgtaggcataggcttggttatgccggtactgccgggcctcttgcgggatatcgtccattccgacagcatcgccagtcactatggcgtgctgctagcgctatatgcgttgatgcaatttctatgcgcacccgttctcggagcactgtccgaccgctttggccgccgcccagtcctgctcgcttcgctacttggagccactatcgactacgcgatcatggcgaccacacccgtcctgtggatcctctacgccggacgcatcgtggccggcatcaccggcgccacaggtgcggttgctggcgcctatatcgccgacatcaccgatggggaagatcgggctcgccacttcgggctcatgagcgcttgtttcggcgtgggtatggtggcaggccccgtggccgggggactgttgggcgccatctccttgcatgcaccattccttgcggcggcggtgctcaacggcctcaacctactactgggctgcttcctaatgcaggagtcgcataagggagagcgtcgaccgatgcccttgagagccttcaacccagtcagctccttccggtgggcgcggggcatgactatcgtcgccgcacttatgactgtcttctttatcatgcaactcgtaggacaggtgccggcagcgctctgggtcattttcggcgaggaccgctttcgctggagcgcgacgatgatcggcctgtcgcttgcggtattcggaatcttgcacgccctcgctcaagccttcgtcactggtcccgccaccaaacgtttcggcgagaagcaggccattatcgccggcatggcggccgacgcgctgggctacgtcttgctggcgttcgcgacgcgaggctggatggccttccccattatgattcttctcgcttccggcggcatcgggatgcccgcgttgcaggccatgctgtccaggcaggtagatgacgaccatcagggacagcttcaaggatcgctcgcggctcttaccagcctaacttcgatcactggaccgctgatcgtcacggcgatttatgccgcctcggcgagcacatggaacgggttggcatggattgtaggcgccgccctataccttgtctgcctccccgcgttgcgtcgcggtgcatggagccgggccacctcgacctgaatggaagccggcggcacctcgctaacggattcaccactccaagaattggagccaatcaattcgcgctgcggacacatacaaagttacccacagattccgtggataagcaggggactaacatgtgaggcaaaacagcagggccgcgccggtggcgtttttccataggctccgccctcctgccagagttcacataaacagacgcttttccggtgcatctgtgggagccgtgaggctcaaccatgaatctgacagtacgggcgaaacccgacaggacttaaagatccccaccgtttccggcgggtcgctccctcttgcgctctcctgttccgaccctgccgtttaccggatacctgttccgcctttctcccttacgggaagtgtggcgctttctcatagctcacacactggtatctcggctcggtgtaggtcgttcgctccaagctgggctgtaagcaagaactccccgttcagcccgactgctgcgccttatccggtaactgttcacttgagtccaacccggaaaagcacggtaaaacgccactggcagcagccattggtaactgggagttcgcagaggatttgtttagctaaacacgcggttgctcttgaagtgtgcgccaaagtccggctacactggaaggacagatttggttgctgtgctctgcgaaagccagttaccacggttaagcagttccccaactgacttaaccttcgatcaaaccacctccccaggtggttttttcgtttacagggcaaaagattacgcgcagaaaaaaaggatctcaagaagatcctttgatcttttctactgaaccgctctagatttcagt

SEQ ID NO: 5609 - DNA, 3834 bp, Artificial Sequence
  Description of Artificial Sequence: Synthetic polynucleotide
cctgtcaaatggacgaagcagggattctgcaaaccctatgctactccgtcaagccgtcaattgtctgattcgttaccaattatgacaacttgacggctacatcattcactttttcttcacaaccggcacggaactcgctcgggctggccccggtgcattttttaaatacccgcgagaaatagagttgatcgtcaaaaccaacattgcgaccgacggtggcgataggcatccgggtggtgctcaaaagcagcttcgcctggctgatacgttggtcctcgcgccagcttaagacgctaatccctaactgctggcggaaaagatgtgacagacgcgacggcgacaagcaaacatgctgtgcgacgctggcgatatcaaaattgctgtctgccaggtgatcgctgatgtactgacaagcctcgcgtacccgattatccatcggtggatggagcgactcgttaatcgcttccatgcgccgcagtaacaattgctcaagcagatttatcgccagcagctccgaatagcgcccttccccttgcccggcgttaatgatttgcccaaacaggtcgctgaaatgcggctggtgcgcttcatccgggcgaaagaaccccgtattggcaaatattgacggccagttaagccattcatgccagtaggcgcgcggacgaaagtaaacccactggtgataccattcgcgagcctccggatgacgaccgtagtgatgaatctctcctggcgggaacagcaaaatatcacccggtcggcaaacaaattctcgtccctgatttttcaccaccccctgaccgcgaatggtgagattgagaatataacctttcattcccagcggtcggtcgataaaaaaatcgagataaccgttggcctcaatcggcgttaaacccgccaccagatgggcattaaacgagtatcccggcagcaggggatcattttgcgcttcagccatacttttcatactcccgccattcagagaagaaaccaattgtccatattgcatcagacattgccgtcactgcgtcttttactggctcttctcgctaaccaaaccggtaaccccgcttattaaaagcattctgtaacaaagcgggaccaaagccatgacaaaaacgcgtaacaaaagtgtctataatcacggcagaaaagtccacattgattatttgcacggcgtcacactttgctatgccatagcatttttatccataagattagcggatcctacctgacgctttttatcgcaactctctactgtttctccatacccgtttttttgggctagcgaattcgagctcggtacccggtcattactactgcaaagtagctgataaccgagaccgctggtctccctttactgctgaataagtagataactacccatgcgagagtagggaactgccaggcatcaaataaaacgaaaggctcagtcgaaagactgggcctttcgttttatctgttgtttgtcggtgaacgctctcctgagtaggacaaatccgccgggagcggatttgaacgttgcgaagcaacggcccggagggtggcgggcaggacgcccgccataaactgccaggcatcaaattaagcagaaggccatcctgacggatggcctttttgcgtttctacaaactcttttgtttatttttctaaatacattcaaatatgtatccgctcatgagaacctataaaaataggcgtatcacgaggccctttcgtcttcaagaattctcatgtttgacagcttatcatcgataagctttaatgcggtagtttatcacagttaaattgctaacgcagtcaggcaccgtgtatgaaatctaacaatgcgctcatcgtcatcctcggcaccgtcaccctggatgctgtaggcataggcttggttatgccggtactgccgggcctcttgcgggatatcgtccattccgacagcatcgccagtcactatggcgtgctgctagcgctatatgcgttgatgcaatttctatgcgcacccgttctcggagcactgtccgaccgctttggccgccgcccagtcctgctcgcttcgctacttggagccactatcgactacgcgatcatggcgaccacacccgtcctgtggatcctctacgccggacgcatcgtggccggcatcaccggcgccacaggtgcggttgctggcgcctatatcgccgacatcaccgatggggaagatcgggctcgccacttcgggctcatgagcgcttgtttcggcgtgggtatggtggcaggccccgtggccgggggactgttgggcgccatctccttgcatgcaccattccttgcggcggcggtgctcaacggcctcaacctactactgggctgcttcctaatgcaggagtcgcataagggagagcgtcgaccgatgcccttgagagccttcaacccagtcagctccttccggtgggcgcggggcatgactatcgtcgccgcacttatgactgtcttctttatcatgcaactcgtaggacaggtgccggcagcgctctgggtcattttcggcgaggaccgctttcgctggagcgcgacgatgatcggcctgtcgcttgcggtattcggaatcttgcacgccctcgctcaagccttcgtcactggtcccgccaccaaacgtttcggcgagaagcaggccattatcgccggcatggcggccgacgcgctgggctacgtcttgctggcgttcgcgacgcgaggctggatggccttccccattatgattcttctcgcttccggcggcatcgggatgcccgcgttgcaggccatgctgtccaggcaggtagatgacgaccatcagggacagcttcaaggatcgctcgcggctcttaccagcctaacttcgatcactggaccgctgatcgtcacggcgatttatgccgcctcggcgagcacatggaacgggttggcatggattgtaggcgccgccctataccttgtctgcctccccgcgttgcgtcgcggtgcatggagccgggccacctcgacctgaatggaagccggcggcacctcgctaacggattcaccactccaagaattggagccaatcaattcgcgctgcggacacatacaaagttacccacagattccgtggataagcaggggactaacatgtgaggcaaaacagcagggccgcgccggtggcgtttttccataggctccgccctcctgccagagttcacataaacagacgcttttccggtgcatctgtgggagccgtgaggctcaaccatgaatctgacagtacgggcgaaacccgacaggacttaaagatccccaccgtttccggcgggtcgctccctcttgcgctctcctgttccgaccctgccgtttaccggatacctgttccgcctttctcccttacgggaagtgtggcgctttctcatagctcacacactggtatctcggctcggtgtaggtcgttcgctccaagctgggctgtaagcaagaactccccgttcagcccgactgctgcgccttatccggtaactgttcacttgagtccaacccggaaaagcacggtaaaacgccactggcagcagccattggtaactgggagttcgcagaggatttgtttagctaaacacgcggttgctcttgaagtgtgcgccaaagtccggctacactggaaggacagatttggttgctgtgctctgcgaaagccagttaccacggttaagcagttccccaactgacttaaccttcgatcaaaccacctccccaggtggttttttcgtttacagggcaaaagattacgcgcagaaaaaaaggatctcaagaagatcctttgatcttttctactgaaccgctctagatttcagt

SEQ ID NO: 5610 - DNA, 3849 bp, Artificial Sequence
  Description of Artificial Sequence: Synthetic polynucleotide
cctgtcaaatggacgaagcagggattctgcaaaccctatgctactccgtcaagccgtcaattgtctgattcgttaccaattatgacaacttgacggctacatcattcactttttcttcacaaccggcacggaactcgctcgggctggccccggtgcattttttaaatacccgcgagaaatagagttgatcgtcaaaaccaacattgcgaccgacggtggcgataggcatccgggtggtgctcaaaagcagcttcgcctggctgatacgttggtcctcgcgccagcttaagacgctaatccctaactgctggcggaaaagatgtgacagacgcgacggcgacaagcaaacatgctgtgcgacgctggcgatatcaaaattgctgtctgccaggtgatcgctgatgtactgacaagcctcgcgtacccgattatccatcggtggatggagcgactcgttaatcgcttccatgcgccgcagtaacaattgctcaagcagatttatcgccagcagctccgaatagcgcccttccccttgcccggcgttaatgatttgcccaaacaggtcgctgaaatgcggctggtgcgcttcatccgggcgaaagaaccccgtattggcaaatattgacggccagttaagccattcatgccagtaggcgcgcggacgaaagtaaacccactggtgataccattcgcgagcctccggatgacgaccgtagtgatgaatctctcctggcgggaacagcaaaatatcacccggtcggcaaacaaattctcgtccctgatttttcaccaccccctgaccgcgaatggtgagattgagaatataacctttcattcccagcggtcggtcgataaaaaaatcgagataaccgttggcctcaatcggcgttaaacccgccaccagatgggcattaaacgagtatcccggcagcaggggatcattttgcgcttcagccatacttttcatactcccgccattcagagaagaaaccaattgtccatattgcatcagacattgccgtcactgcgtcttttactggctcttctcgctaaccaaaccggtaaccccgcttattaaaagcattctgtaacaaagcgggaccaaagccatgacaaaaacgcgtaacaaaagtgtctataatcacggcagaaaagtccacattgattatttgcacggcgtcacactttgctatgccatagcatttttatccataagattagcggatcctacctgacgctttttatcgcaactctctactgtttctccatacccgtttttttgggctagcgaattcgagctcggtacccggtcattactactgcaaagtagctgataacaaacgaaccaccttcattcgagtacaagagcactttactgctgaataagtagataactacccatgcgagagtagggaactgccaggcatcaaataaaacgaaaggctcagtcgaaagactgggcctttcgttttatctgttgtttgtcggtgaacgctctcctgagtaggacaaatccgccgggagcggatttgaacgttgcgaagcaacggcccggagggtggcgggcaggacgcccgccataaactgccaggcatcaaattaagcagaaggccatcctgacggatggcctttttgcgtttctacaaactcttttgtttatttttctaaatacattcaaatatgtatccgctcatgagaacctataaaaataggcgtatcacgaggccctttcgtcttcaagaattctcatgtttgacagcttatcatcgataagctttaatgcggtagtttatcacagttaaattgctaacgcagtcaggcaccgtgtatgaaatctaacaatgcgctcatcgtcatcctcggcaccgtcaccctggatgctgtaggcataggcttggttatgccggtactgccgggcctcttgcgggatatcgtccattccgacagcatcgccagtcactatggcgtgctgctagcgctatatgcgttgatgcaatttctatgcgcacccgttctcggagcactgtccgaccgctttggccgccgcccagtcctgctcgcttcgctacttggagccactatcgactacgcgatcatggcgaccacacccgtcctgtggatcctctacgccggacgcatcgtggccggcatcaccggcgccacaggtgcggttgctggcgcctatatcgccgacatcaccgatggggaagatcgggctcgccacttcgggctcatgagcgcttgtttcggcgtgggtatggtggcaggccccgtggccgggggactgttgggcgccatctccttgcatgcaccattccttgcggcggcggtgctcaacggcctcaacctactactgggctgcttcctaatgcaggagtcgcataagggagagcgtcgaccgatgcccttgagagccttcaacccagtcagctccttccggtgggcgcggggcatgactatcgtcgccgcacttatgactgtcttctttatcatgcaactcgtaggacaggtgccggcagcgctctgggtcattttcggcgaggaccgctttcgctggagcgcgacgatgatcggcctgtcgcttgcggtattcggaatcttgcacgccctcgctcaagccttcgtcactggtcccgccaccaaacgtttcggcgagaagcaggccattatcgccggcatggcggccgacgcgctgggctacgtcttgctggcgttcgcgacgcgaggctggatggccttccccattatgattcttctcgcttccggcggcatcgggatgcccgcgttgcaggccatgctgtccaggcaggtagatgacgaccatcagggacagcttcaaggatcgctcgcggctcttaccagcctaacttcgatcactggaccgctgatcgtcacggcgatttatgccgcctcggcgagcacatggaacgggttggcatggattgtaggcgccgccctataccttgtctgcctccccgcgttgcgtcgcggtgcatggagccgggccacctcgacctgaatggaagccggcggcacctcgctaacggattcaccactccaagaattggagccaatcaattcgcgctgcggacacatacaaagttacccacagattccgtggataagcaggggactaacatgtgaggcaaaacagcagggccgcgccggtggcgtttttccataggctccgccctcctgccagagttcacataaacagacgcttttccggtgcatctgtgggagccgtgaggctcaaccatgaatctgacagtacgggcgaaacccgacaggacttaaagatccccaccgtttccggcgggtcgctccctcttgcgctctcctgttccgaccctgccgtttaccggatacctgttccgcctttctcccttacgggaagtgtggcgctttctcatagctcacacactggtatctcggctcggtgtaggtcgttcgctccaagctgggctgtaagcaagaactccccgttcagcccgactgctgcgccttatccggtaactgttcacttgagtccaacccggaaaagcacggtaaaacgccactggcagcagccattggtaactgggagttcgcagaggatttgtttagctaaacacgcggttgctcttgaagtgtgcgccaaagtccggctacactggaaggacagatttggttgctgtgctctgcgaaagccagttaccacggttaagcagttccccaactgacttaaccttcgatcaaaccacctccccaggtggttttttcgtttacagggcaaaagattacgcgcagaaaaaaaggatctcaagaagatcctttgatcttttctactgaaccgctctagatttcagt

SEQ ID NO: 5611 - DNA, 3849 bp, Artificial Sequence
  Description of Artificial Sequence: Synthetic polynucleotide
cctgtcaaatggacgaagcagggattctgcaaaccctatgctactccgtcaagccgtcaattgtctgattcgttaccaattatgacaacttgacggctacatcattcactttttcttcacaaccggcacggaactcgctcgggctggccccggtgcattttttaaatacccgcgagaaatagagttgatcgtcaaaaccaacattgcgaccgacggtggcgataggcatccgggtggtgctcaaaagcagcttcgcctggctgatacgttggtcctcgcgccagcttaagacgctaatccctaactgctggcggaaaagatgtgacagacgcgacggcgacaagcaaacatgctgtgcgacgctggcgatatcaaaattgctgtctgccaggtgatcgctgatgtactgacaagcctcgcgtacccgattatccatcggtggatggagcgactcgttaatcgcttccatgcgccgcagtaacaattgctcaagcagatttatcgccagcagctccgaatagcgcccttccccttgcccggcgttaatgatttgcccaaacaggtcgctgaaatgcggctggtgcgcttcatccgggcgaaagaaccccgtattggcaaatattgacggccagttaagccattcatgccagtaggcgcgcggacgaaagtaaacccactggtgataccattcgcgagcctccggatgacgaccgtagtgatgaatctctcctggcgggaacagcaaaatatcacccggtcggcaaacaaattctcgtccctgatttttcaccaccccctgaccgcgaatggtgagattgagaatataacctttcattcccagcggtcggtcgataaaaaaatcgagataaccgttggcctcaatcggcgttaaacccgccaccagatgggcattaaacgagtatcccggcagcaggggatcattttgcgcttcagccatacttttcatactcccgccattcagagaagaaaccaattgtccatattgcatcagacattgccgtcactgcgtcttttactggctcttctcgctaaccaaaccggtaaccccgcttattaaaagcattctgtaacaaagcgggaccaaagccatgacaaaaacgcgtaacaaaagtgtctataatcacggcagaaaagtccacattgattatttgcacggcgtcacactttgctatgccatagcatttttatccataagattagcggatcctacctgacgctttttatcgcaactctctactgtttctccatacccgtttttttgggctagcgaattcgagctcggtacccggtcattactactgcaaagtagctgataacaagcgtacaacgtttatccgagttcaagagcactttactgctgaataagtagataactacccatgcgagagtagggaactgccaggcatcaaataaaacgaaaggctcagtcgaaagactgggcctttcgttttatctgttgtttgtcggtgaacgctctcctgagtaggacaaatccgccgggagcggatttgaacgttgcgaagcaacggcccggagggtggcgggcaggacgcccgccataaactgccaggcatcaaattaagcagaaggccatcctgacggatggcctttttgcgtttctacaaactcttttgtttatttttctaaatacattcaaatatgtatccgctcatgagaacctataaaaataggcgtatcacgaggccctttcgtcttcaagaattctcatgtttgacagcttatcatcgataagctttaatgcggtagtttatcacagttaaattgctaacgcagtcaggcaccgtgtatgaaatctaacaatgcgctcatcgtcatcctcggcaccgtcaccctggatgctgtaggcataggcttggttatgccggtactgccgggcctcttgcgggatatcgtccattccgacagcatcgccagtcactatggcgtgctgctagcgctatatgcgttgatgcaatttctatgcgcacccgttctcggagcactgtccgaccgctttggccgccgcccagtcctgctcgcttcgctacttggagccactatcgactacgcgatcatggcgaccacacccgtcctgtggatcctctacgccggacgcatcgtggccggcatcaccggcgccacaggtgcggttgctggcgcctatatcgccgacatcaccgatggggaagatcgggctcgccacttcgggctcatgagcgcttgtttcggcgtgggtatggtggcaggccccgtggccgggggactgttgggcgccatctccttgcatgcaccattccttgcggcggcggtgctcaacggcctcaacctactactgggctgcttcctaatgcaggagtcgcataagggagagcgtcgaccgatgcccttgagagccttcaacccagtcagctccttccggtgggcgcggggcatgactatcgtcgccgcacttatgactgtcttctttatcatgcaactcgtaggacaggtgccggcagcgctctgggtcattttcggcgaggaccgctttcgctggagcgcgacgatgatcggcctgtcgcttgcggtattcggaatcttgcacgccctcgctcaagccttcgtcactggtcccgccaccaaacgtttcggcgagaagcaggccattatcgccggcatggcggccgacgcgctgggctacgtcttgctggcgttcgcgacgcgaggctggatggccttccccattatgattcttctcgcttccggcggcatcgggatgcccgcgttgcaggccatgctgtccaggcaggtagatgacgaccatcagggacagcttcaaggatcgctcgcggctcttaccagcctaacttcgatcactggaccgctgatcgtcacggcgatttatgccgcctcggcgagcacatggaacgggttggcatggattgtaggcgccgccctataccttgtctgcctccccgcgttgcgtcgcggtgcatggagccgggccacctcgacctgaatggaagccggcggcacctcgctaacggattcaccactccaagaattggagccaatcaattcgcgctgcggacacatacaaagttacccacagattccgtggataagcaggggactaacatgtgaggcaaaacagcagggccgcgccggtggcgtttttccataggctccgccctcctgccagagttcacataaacagacgcttttccggtgcatctgtgggagccgtgaggctcaaccatgaatctgacagtacgggcgaaacccgacaggacttaaagatccccaccgtttccggcgggtcgctccctcttgcgctctcctgttccgaccctgccgtttaccggatacctgttccgcctttctcccttacgggaagtgtggcgctttctcatagctcacacactggtatctcggctcggtgtaggtcgttcgctccaagctgggctgtaagcaagaactccccgttcagcccgactgctgcgccttatccggtaactgttcacttgagtccaacccggaaaagcacggtaaaacgccactggcagcagccattggtaactgggagttcgcagaggatttgtttagctaaacacgcggttgctcttgaagtgtgcgccaaagtccggctacactggaaggacagatttggttgctgtgctctgcgaaagccagttaccacggttaagcagttccccaactgacttaaccttcgatcaaaccacctccccaggtggttttttcgtttacagggcaaaagattacgcgcagaaaaaaaggatctcaagaagatcctttgatcttttctactgaaccgctctagatttcagt

SEQ ID NO: 5612 - DNA, 3849 bp, Artificial Sequence
  Description of Artificial Sequence: Synthetic polynucleotide
cctgtcaaatggacgaagcagggattctgcaaaccctatgctactccgtcaagccgtcaattgtctgattcgttaccaattatgacaacttgacggctacatcattcactttttcttcacaaccggcacggaactcgctcgggctggccccggtgcattttttaaatacccgcgagaaatagagttgatcgtcaaaaccaacattgcgaccgacggtggcgataggcatccgggtggtgctcaaaagcagcttcgcctggctgatacgttggtcctcgcgccagcttaagacgctaatccctaactgctggcggaaaagatgtgacagacgcgacggcgacaagcaaacatgctgtgcgacgctggcgatatcaaaattgctgtctgccaggtgatcgctgatgtactgacaagcctcgcgtacccgattatccatcggtggatggagcgactcgttaatcgcttccatgcgccgcagtaacaattgctcaagcagatttatcgccagcagctccgaatagcgcccttccccttgcccggcgttaatgatttgcccaaacaggtcgctgaaatgcggctggtgcgcttcatccgggcgaaagaaccccgtattggcaaatattgacggccagttaagccattcatgccagtaggcgcgcggacgaaagtaaacccactggtgataccattcgcgagcctccggatgacgaccgtagtgatgaatctctcctggcgggaacagcaaaatatcacccggtcggcaaacaaattctcgtccctgatttttcaccaccccctgaccgcgaatggtgagattgagaatataacctttcattcccagcggtcggtcgataaaaaaatcgagataaccgttggcctcaatcggcgttaaacccgccaccagatgggcattaaacgagtatcccggcagcaggggatcattttgcgcttcagccatacttttcatactcccgccattcagagaagaaaccaattgtccatattgcatcagacattgccgtcactgcgtcttttactggctcttctcgctaaccaaaccggtaaccccgcttattaaaagcattctgtaacaaagcgggaccaaagccatgacaaaaacgcgtaacaaaagtgtctataatcacggcagaaaagtccacattgattatttgcacggcgtcacactttgctatgccatagcatttttatccataagattagcggatcctacctgacgctttttatcgcaactctctactgtttctccatacccgtttttttgggctagcgaattcgagctcggtacccggtcattactactgcaaagtagctgataactacgggtaacagtttctttatggcagggtgaactttactgctgaataagtagataactacccatgcgagagtagggaactgccaggcatcaaataaaacgaaaggctcagtcgaaagactgggcctttcgttttatctgttgtttgtcggtgaacgctctcctgagtaggacaaatccgccgggagcggatttgaacgttgcgaagcaacggcccggagggtggcgggcaggacgcccgccataaactgccaggcatcaaattaagcagaaggccatcctgacggatggcctttttgcgtttctacaaactcttttgtttatttttctaaatacattcaaatatgtatccgctcatgagaacctataaaaataggcgtatcacgaggccctttcgtcttcaagaattctcatgtttgacagcttatcatcgataagctttaatgcggtagtttatcacagttaaattgctaacgcagtcaggcaccgtgtatgaaatctaacaatgcgctcatcgtcatcctcggcaccgtcaccctggatgctgtaggcataggcttggttatgccggtactgccgggcctcttgcgggatatcgtccattccgacagcatcgccagtcactatggcgtgctgctagcgctatatgcgttgatgcaatttctatgcgcacccgttctcggagcactgtccgaccgctttggccgccgcccagtcctgctcgcttcgctacttggagccactatcgactacgcgatcatggcgaccacacccgtcctgtggatcctctacgccggacgcatcgtggccggcatcaccggcgccacaggtgcggttgctggcgcctatatcgccgacatcaccgatggggaagatcgggctcgccacttcgggctcatgagcgcttgtttcggcgtgggtatggtggcaggccccgtggccgggggactgttgggcgccatctccttgcatgcaccattccttgcggcggcggtgctcaacggcctcaacctactactgggctgcttcctaatgcaggagtcgcataagggagagcgtcgaccgatgcccttgagagccttcaacccagtcagctccttccggtgggcgcggggcatgactatcgtcgccgcacttatgactgtcttctttatcatgcaactcgtaggacaggtgccggcagcgctctgggtcattttcggcgaggaccgctttcgctggagcgcgacgatgatcggcctgtcgcttgcggtattcggaatcttgcacgccctcgctcaagccttcgtcactggtcccgccaccaaacgtttcggcgagaagcaggccattatcgccggcatggcggccgacgcgctgggctacgtcttgctggcgttcgcgacgcgaggctggatggccttccccattatgattcttctcgcttccggcggcatcgggatgcccgcgttgcaggccatgctgtccaggcaggtagatgacgaccatcagggacagcttcaaggatcgctcgcggctcttaccagcctaacttcgatcactggaccgctgatcgtcacggcgatttatgccgcctcggcgagcacatggaacgggttggcatggattgtaggcgccgccctataccttgtctgcctccccgcgttgcgtcgcggtgcatggagccgggccacctcgacctgaatggaagccggcggcacctcgctaacggattcaccactccaagaattggagccaatcaattcgcgctgcggacacatacaaagttacccacagattccgtggataagcaggggactaacatgtgaggcaaaacagcagggccgcgccggtggcgtttttccataggctccgccctcctgccagagttcacataaacagacgcttttccggtgcatctgtgggagccgtgaggctcaaccatgaatctgacagtacgggcgaaacccgacaggacttaaagatccccaccgtttccggcgggtcgctccctcttgcgctctcctgttccgaccctgccgtttaccggatacctgttccgcctttctcccttacgggaagtgtggcgctttctcatagctcacacactggtatctcggctcggtgtaggtcgttcgctccaagctgggctgtaagcaagaactccccgttcagcccgactgctgcgccttatccggtaactgttcacttgagtccaacccggaaaagcacggtaaaacgccactggcagcagccattggtaactgggagttcgcagaggatttgtttagctaaacacgcggttgctcttgaagtgtgcgccaaagtccggctacactggaaggacagatttggttgctgtgctctgcgaaagccagttaccacggttaagcagttccccaactgacttaaccttcgatcaaaccacctccccaggtggttttttcgtttacagggcaaaagattacgcgcagaaaaaaaggatctcaagaagatcctttgatcttttctactgaaccgctctagatttcagt

SEQ ID NO: 5613 - DNA, 3849 bp, Artificial Sequence
  Description of Artificial Sequence: Synthetic polynucleotide
cctgtcaaatggacgaagcagggattctgcaaaccctatgctactccgtcaagccgtcaattgtctgattcgttaccaattatgacaacttgacggctacatcattcactttttcttcacaaccggcacggaactcgctcgggctggccccggtgcattttttaaatacccgcgagaaatagagttgatcgtcaaaaccaacattgcgaccgacggtggcgataggcatccgggtggtgctcaaaagcagcttcgcctggctgatacgttggtcctcgcgccagcttaagacgctaatccctaactgctggcggaaaagatgtgacagacgcgacggcgacaagcaaacatgctgtgcgacgctggcgatatcaaaattgctgtctgccaggtgatcgctgatgtactgacaagcctcgcgtacccgattatccatcggtggatggagcgactcgttaatcgcttccatgcgccgcagtaacaattgctcaagcagatttatcgccagcagctccgaatagcgcccttccccttgcccggcgttaatgatttgcccaaacaggtcgctgaaatgcggctggtgcgcttcatccgggcgaaagaaccccgtattggcaaatattgacggccagttaagccattcatgccagtaggcgcgcggacgaaagtaaacccactggtgataccattcgcgagcctccggatgacgaccgtagtgatgaatctctcctggcgggaacagcaaaatatcacccggtcggcaaacaaattctcgtccctgatttttcaccaccccctgaccgcgaatggtgagattgagaatataacctttcattcccagcggtcggtcgataaaaaaatcgagataaccgttggcctcaatcggcgttaaacccgccaccagatgggcattaaacgagtatcccggcagcaggggatcattttgcgcttcagccatacttttcatactcccgccattcagagaagaaaccaattgtccatattgcatcagacattgccgtcactgcgtcttttactggctcttctcgctaaccaaaccggtaaccccgcttattaaaagcattctgtaacaaagcgggaccaaagccatgacaaaaacgcgtaacaaaagtgtctataatcacggcagaaaagtccacattgattatttgcacggcgtcacactttgctatgccatagcatttttatccataagattagcggatcctacctgacgctttttatcgcaactctctactgtttctccatacccgtttttttgggctagcgaattcgagctcggtacccggtcattactactgcaaagtagctgataacacagcggatggttcggataatgcgaacagcgcctttactgctgaataagtagataactacccatgcgagagtagggaactgccaggcatcaaataaaacgaaaggctcagtcgaaagactgggcctttcgttttatctgttgtttgtcggtgaacgctctcctgagtaggacaaatccgccgggagcggatttgaacgttgcgaagcaacggcccggagggtggcgggcaggacgcccgccataaactgccaggcatcaaattaagcagaaggccatcctgacggatggcctttttgcgtttctacaaactcttttgtttatttttctaaatacattcaaatatgtatccgctcatgagaacctataaaaataggcgtatcacgaggccctttcgtcttcaagaattctcatgtttgacagcttatcatcgataagctttaatgcggtagtttatcacagttaaattgctaacgcagtcaggcaccgtgtatgaaatctaacaatgcgctcatcgtcatcctcggcaccgtcaccctggatgctgtaggcataggcttggttatgccggtactgccgggcctcttgcgggatatcgtccattccgacagcatcgccagtcactatggcgtgctgctagcgctatatgcgttgatgcaatttctatgcgcacccgttctcggagcactgtccgaccgctttggccgccgcccagtcctgctcgcttcgctacttggagccactatcgactacgcgatcatggcgaccacacccgtcctgtggatcctctacgccggacgcatcgtggccggcatcaccggcgccacaggtgcggttgctggcgcctatatcgccgacatcaccgatggggaagatcgggctcgccacttcgggctcatgagcgcttgtttcggcgtgggtatggtggcaggccccgtggccgggggactgttgggcgccatctccttgcatgcaccattccttgcggcggcggtgctcaacggcctcaacctactactgggctgcttcctaatgcaggagtcgcataagggagagcgtcgaccgatgcccttgagagccttcaacccagtcagctccttccggtgggcgcggggcatgactatcgtcgccgcacttatgactgtcttctttatcatgcaactcgtaggacaggtgccggcagcgctctgggtcattttcggcgaggaccgctttcgctggagcgcgacgatgatcggcctgtcgcttgcggtattcggaatcttgcacgccctcgctcaagccttcgtcactggtcccgccaccaaacgtttcggcgagaagcaggccattatcgccggcatggcggccgacgcgctgggctacgtcttgctggcgttcgcgacgcgaggctggatggccttccccattatgattcttctcgcttccggcggcatcgggatgcccgcgttgcaggccatgctgtccaggcaggtagatgacgaccatcagggacagcttcaaggatcgctcgcggctcttaccagcctaacttcgatcactggaccgctgatcgtcacggcgatttatgccgcctcggcgagcacatggaacgggttggcatggattgtaggcgccgccctataccttgtctgcctccccgcgttgcgtcgcggtgcatggagccgggccacctcgacctgaatggaagccggcggcacctcgctaacggattcaccactccaagaattggagccaatcaattcgcgctgcggacacatacaaagttacccacagattccgtggataagcaggggactaacatgtgaggcaaaacagcagggccgcgccggtggcgtttttccataggctccgccctcctgccagagttcacataaacagacgcttttccggtgcatctgtgggagccgtgaggctcaaccatgaatctgacagtacgggcgaaacccgacaggacttaaagatccccaccgtttccggcgggtcgctccctcttgcgctctcctgttccgaccctgccgtttaccggatacctgttccgcctttctcccttacgggaagtgtggcgctttctcatagctcacacactggtatctcggctcggtgtaggtcgttcgctccaagctgggctgtaagcaagaactccccgttcagcccgactgctgcgccttatccggtaactgttcacttgagtccaacccggaaaagcacggtaaaacgccactggcagcagccattggtaactgggagttcgcagaggatttgtttagctaaacacgcggttgctcttgaagtgtgcgccaaagtccggctacactggaaggacagatttggttgctgtgctctgcgaaagccagttaccacggttaagcagttccccaactgacttaaccttcgatcaaaccacctccccaggtggttttttcgtttacagggcaaaagattacgcgcagaaaaaaaggatctcaagaagatcctttgatcttttctactgaaccgctctagatttcagt

SEQ ID NO: 5614 - DNA, 3849 bp, Artificial Sequence
  Description of Artificial Sequence: Synthetic polynucleotide
cctgtcaaatggacgaagcagggattctgcaaaccctatgctactccgtcaagccgtcaattgtctgattcgttaccaattatgacaacttgacggctacatcattcactttttcttcacaaccggcacggaactcgctcgggctggccccggtgcattttttaaatacccgcgagaaatagagttgatcgtcaaaaccaacattgcgaccgacggtggcgataggcatccgggtggtgctcaaaagcagcttcgcctggctgatacgttggtcctcgcgccagcttaagacgctaatccctaactgctggcggaaaagatgtgacagacgcgacggcgacaagcaaacatgctgtgcgacgctggcgatatcaaaattgctgtctgccaggtgatcgctgatgtactgacaagcctcgcgtacccgattatccatcggtggatggagcgactcgttaatcgcttccatgcgccgcagtaacaattgctcaagcagatttatcgccagcagctccgaatagcgcccttccccttgcccggcgttaatgatttgcccaaacaggtcgctgaaatgcggctggtgcgcttcatccgggcgaaagaaccccgtattggcaaatattgacggccagttaagccattcatgccagtaggcgcgcggacgaaagtaaacccactggtgataccattcgcgagcctccggatgacgaccgtagtgatgaatctctcctggcgggaacagcaaaatatcacccggtcggcaaacaaattctcgtccctgatttttcaccaccccctgaccgcgaatggtgagattgagaatataacctttcattcccagcggtcggtcgataaaaaaatcgagataaccgttggcctcaatcggcgttaaacccgccaccagatgggcattaaacgagtatcccggcagcaggggatcattttgcgcttcagccatacttttcatactcccgccattcagagaagaaaccaattgtccatattgcatcagacattgccgtcactgcgtcttttactggctcttctcgctaaccaaaccggtaaccccgcttattaaaagcattctgtaacaaagcgggaccaaagccatgacaaaaacgcgtaacaaaagtgtctataatcacggcagaaaagtccacattgattatttgcacggcgtcacactttgctatgccatagcatttttatccataagattagcggatcctacctgacgctttttatcgcaactctctactgtttctccatacccgtttttttgggctagcgaattcgagctcggtacccgggtgaactgccgagtaggtagctgataacacagcggatggttcggataatgcgaacagcgccttaactgccgagtaggtagatgataacccatgcgagagtagggaactgccaggcatcaaataaaacgaaaggctcagtcgaaagactgggcctttcgttttatctgttgtttgtcggtgaacgctctcctgagtaggacaaatccgccgggagcggatttgaacgttgcgaagcaacggcccggagggtggcgggcaggacgcccgccataaactgccaggcatcaaattaagcagaaggccatcctgacggatggcctttttgcgtttctacaaactcttttgtttatttttctaaatacattcaaatatgtatccgctcatgagaacctataaaaataggcgtatcacgaggccctttcgtcttcaagaattctcatgtttgacagcttatcatcgataagctttaatgcggtagtttatcacagttaaattgctaacgcagtcaggcaccgtgtatgaaatctaacaatgcgctcatcgtcatcctcggcaccgtcaccctggatgctgtaggcataggcttggttatgccggtactgccgggcctcttgcgggatatcgtccattccgacagcatcgccagtcactatggcgtgctgctagcgctatatgcgttgatgcaatttctatgcgcacccgttctcggagcactgtccgaccgctttggccgccgcccagtcctgctcgcttcgctacttggagccactatcgactacgcgatcatggcgaccacacccgtcctgtggatcctctacgccggacgcatcgtggccggcatcaccggcgccacaggtgcggttgctggcgcctatatcgccgacatcaccgatggggaagatcgggctcgccacttcgggctcatgagcgcttgtttcggcgtgggtatggtggcaggccccgtggccgggggactgttgggcgccatctccttgcatgcaccattccttgcggcggcggtgctcaacggcctcaacctactactgggctgcttcctaatgcaggagtcgcataagggagagcgtcgaccgatgcccttgagagccttcaacccagtcagctccttccggtgggcgcggggcatgactatcgtcgccgcacttatgactgtcttctttatcatgcaactcgtaggacaggtgccggcagcgctctgggtcattttcggcgaggaccgctttcgctggagcgcgacgatgatcggcctgtcgcttgcggtattcggaatcttgcacgccctcgctcaagccttcgtcactggtcccgccaccaaacgtttcggcgagaagcaggccattatcgccggcatggcggccgacgcgctgggctacgtcttgctggcgttcgcgacgcgaggctggatggccttccccattatgattcttctcgcttccggcggcatcgggatgcccgcgttgcaggccatgctgtccaggcaggtagatgacgaccatcagggacagcttcaaggatcgctcgcggctcttaccagcctaacttcgatcactggaccgctgatcgtcacggcgatttatgccgcctcggcgagcacatggaacgggttggcatggattgtaggcgccgccctataccttgtctgcctccccgcgttgcgtcgcggtgcatggagccgggccacctcgacctgaatggaagccggcggcacctcgctaacggattcaccactccaagaattggagccaatcaattcgcgctgcggacacatacaaagttacccacagattccgtggataagcaggggactaacatgtgaggcaaaacagcagggccgcgccggtggcgtttttccataggctccgccctcctgccagagttcacataaacagacgcttttccggtgcatctgtgggagccgtgaggctcaaccatgaatctgacagtacgggcgaaacccgacaggacttaaagatccccaccgtttccggcgggtcgctccctcttgcgctctcctgttccgaccctgccgtttaccggatacctgttccgcctttctcccttacgggaagtgtggcgctttctcatagctcacacactggtatctcggctcggtgtaggtcgttcgctccaagctgggctgtaagcaagaactccccgttcagcccgactgctgcgccttatccggtaactgttcacttgagtccaacccggaaaagcacggtaaaacgccactggcagcagccattggtaactgggagttcgcagaggatttgtttagctaaacacgcggttgctcttgaagtgtgcgccaaagtccggctacactggaaggacagatttggttgctgtgctctgcgaaagccagttaccacggttaagcagttccccaactgacttaaccttcgatcaaaccacctccccaggtggttttttcgtttacagggcaaaagattacgcgcagaaaaaaaggatctcaagaagatcctttgatcttttctactgaaccgctctagatttcagt

SEQ ID NO: 5615 - DNA, 3849 bp, Artificial Sequence
  Description of Artificial Sequence: Synthetic polynucleotide
cctgtcaaatggacgaagcagggattctgcaaaccctatgctactccgtcaagccgtcaattgtctgattcgttaccaattatgacaacttgacggctacatcattcactttttcttcacaaccggcacggaactcgctcgggctggccccggtgcattttttaaatacccgcgagaaatagagttgatcgtcaaaaccaacattgcgaccgacggtggcgataggcatccgggtggtgctcaaaagcagcttcgcctggctgatacgttggtcctcgcgccagcttaagacgctaatccctaactgctggcggaaaagatgtgacagacgcgacggcgacaagcaaacatgctgtgcgacgctggcgatatcaaaattgctgtctgccaggtgatcgctgatgtactgacaagcctcgcgtacccgattatccatcggtggatggagcgactcgttaatcgcttccatgcgccgcagtaacaattgctcaagcagatttatcgccagcagctccgaatagcgcccttccccttgcccggcgttaatgatttgcccaaacaggtcgctgaaatgcggctggtgcgcttcatccgggcgaaagaaccccgtattggcaaatattgacggccagttaagccattcatgccagtaggcgcgcggacgaaagtaaacccactggtgataccattcgcgagcctccggatgacgaccgtagtgatgaatctctcctggcgggaacagcaaaatatcacccggtcggcaaacaaattctcgtccctgatttttcaccaccccctgaccgcgaatggtgagattgagaatataacctttcattcccagcggtcggtcgataaaaaaatcgagataaccgttggcctcaatcggcgttaaacccgccaccagatgggcattaaacgagtatcccggcagcaggggatcattttgcgcttcagccatacttttcatactcccgccattcagagaagaaaccaattgtccatattgcatcagacattgccgtcactgcgtcttttactggctcttctcgctaaccaaaccggtaaccccgcttattaaaagcattctgtaacaaagcgggaccaaagccatgacaaaaacgcgtaacaaaagtgtctataatcacggcagaaaagtccacattgattatttgcacggcgtcacactttgctatgccatagcatttttatccataagattagcggatcctacctgacgctttttatcgcaactctctactgtttctccatacccgtttttttgggctagcgaattcgagctcggtacccggtcattactactgcaaagtagctgataacacagcggatggttcggataatgcgaacagcgcgtgtactgctgaataagtagctaactacccatgcgagagtagggaactgccaggcatcaaataaaacgaaaggctcagtcgaaagactgggcctttcgttttatctgttgtttgtcggtgaacgctctcctgagtaggacaaatccgccgggagcggatttgaacgttgcgaagcaacggcccggagggtggcgggcaggacgcccgccataaactgccaggcatcaaattaagcagaaggccatcctgacggatggcctttttgcgtttctacaaactcttttgtttatttttctaaatacattcaaatatgtatccgctcatgagaacctataaaaataggcgtatcacgaggccctttcgtcttcaagaattctcatgtttgacagcttatcatcgataagctttaatgcggtagtttatcacagttaaattgctaacgcagtcaggcaccgtgtatgaaatctaacaatgcgctcatcgtcatcctcggcaccgtcaccctggatgctgtaggcataggcttggttatgccggtactgccgggcctcttgcgggatatcgtccattccgacagcatcgccagtcactatggcgtgctgctagcgctatatgcgttgatgcaatttctatgcgcacccgttctcggagcactgtccgaccgctttggccgccgcccagtcctgctcgcttcgctacttggagccactatcgactacgcgatcatggcgaccacacccgtcctgtggatcctctacgccggacgcatcgtggccggcatcaccggcgccacaggtgcggttgctggcgcctatatcgccgacatcaccgatggggaagatcgggctcgccacttcgggctcatgagcgcttgtttcggcgtgggtatggtggcaggccccgtggccgggggactgttgggcgccatctccttgcatgcaccattccttgcggcggcggtgctcaacggcctcaacctactactgggctgcttcctaatgcaggagtcgcataagggagagcgtcgaccgatgcccttgagagccttcaacccagtcagctccttccggtgggcgcggggcatgactatcgtcgccgcacttatgactgtcttctttatcatgcaactcgtaggacaggtgccggcagcgctctgggtcattttcggcgaggaccgctttcgctggagcgcgacgatgatcggcctgtcgcttgcggtattcggaatcttgcacgccctcgctcaagccttcgtcactggtcccgccaccaaacgtttcggcgagaagcaggccattatcgccggcatggcggccgacgcgctgggctacgtcttgctggcgttcgcgacgcgaggctggatggccttccccattatgattcttctcgcttccggcggcatcgggatgcccgcgttgcaggccatgctgtccaggcaggtagatgacgaccatcagggacagcttcaaggatcgctcgcggctcttaccagcctaacttcgatcactggaccgctgatcgtcacggcgatttatgccgcctcggcgagcacatggaacgggttggcatggattgtaggcgccgccctataccttgtctgcctccccgcgttgcgtcgcggtgcatggagccgggccacctcgacctgaatggaagccggcggcacctcgctaacggattcaccactccaagaattggagccaatcaattcgcgctgcggacacatacaaagttacccacagattccgtggataagcaggggactaacatgtgaggcaaaacagcagggccgcgccggtggcgtttttccataggctccgccctcctgccagagttcacataaacagacgcttttccggtgcatctgtgggagccgtgaggctcaaccatgaatctgacagtacgggcgaaacccgacaggacttaaagatccccaccgtttccggcgggtcgctccctcttgcgctctcctgttccgaccctgccgtttaccggatacctgttccgcctttctcccttacgggaagtgtggcgctttctcatagctcacacactggtatctcggctcggtgtaggtcgttcgctccaagctgggctgtaagcaagaactccccgttcagcccgactgctgcgccttatccggtaactgttcacttgagtccaacccggaaaagcacggtaaaacgccactggcagcagccattggtaactgggagttcgcagaggatttgtttagctaaacacgcggttgctcttgaagtgtgcgccaaagtccggctacactggaaggacagatttggttgctgtgctctgcgaaagccagttaccacggttaagcagttccccaactgacttaaccttcgatcaaaccacctccccaggtggttttttcgtttacagggcaaaagattacgcgcagaaaaaaaggatctcaagaagatcctttgatcttttctactgaaccgctctagatttcagt

SEQ ID NO: 5616 - DNA, 30000 bp, Artificial Sequence
  Description of Artificial Sequence: Synthetic polynucleotide
tgacagcgtcagggataaagccagcgacaaggataaggagcgggtgaccaaaaacatcaacatcatgtggaatgcgctttccaaaaacagaatgtttgacggcaacaaagagctgaaagagtttgtgatgacgctgaccggctcactggtgtttggtcccaacggcgaaatcacaccgctgtcagccagaaccactgaccgttcaattatccgggccatgatggaaggcggcacagcaaaaatttctcactgcaacgattctgataaatgcctgaaagtggtggcagacacaccggtgaccatcagccgggataatgcactgaagtctcagattactaaacttctggccagcattcagaacaaggctgtcagtgacacgcctctggatgacaaggaaaaaggctttatttccagtaccaccatccccgtcttcaaatacctggttgacccgcagatgctcggtgtttccaacagtatgatttaccagctgacggactatatcggttacgacatcctgctgcagtacattcaggagctgatacagcaggcacgggcgatggtggccacgggaaattatgacgaagcggttatcgggcatattaacgacaacatgaatgatgccacccggcagattgcggcgtttcagtcacaggtgcaggtacagcaggatgcgctgctggttgtcgatcgtcagatgagctacatgcgtcagcagctttccgcccgcatgctcagtcgttaccagaacaactatcacttcggagggagcacgctgtgaatgaagtttatgtgattgccggtggtgagtggttgcggaataacctgaacgccattgccgcctttatgggaacctggacgtgggattccattgaaaaaattgcgctcacattgtctgttctcgcggtggccgtaatgtgggtacagcggcacaacgtgatggatttgctgggctgggtggccgtgtttgtgcttatcagcctgctggttaatgtccgcacatcggtgcagattattgataacagtgacctggtcaaagttcaccgggtggataatgtgccggtcggtctggcgatgccactttcactgacgacccgtatcgggcatgcaatggtggccagttacgagatgatcttcacgcaaccggacagcgtcacctacagcaaaacggggatgctgttcggggcgaatctgattgtgaaaagcaccgatttcctgtcccggaatccggaaatcatcaatctgttccaggactacgtccagaactgcgtgctgggtgatatttacctgaatcataaatacacgctggaagacctgatggcctccgctgacccctacacgctgattttttcccgccccagcccgctacggggcgtttatgacaacaataataatttcataacttgtaaggatgcgtcggtcacgctgaaagacaggctgaatctcgatacaaagacgggaggcaagacctggcattattatgtgcagcagatatttggcggcagaccggacccggacctgttattcagacaactggtcagtgacagttacagttatttctacggctccagtcagtctgccagccagattatgcgccagaacgtcaccatgaatgccctgaaagagggtatcaccagtaatgcagcccgtaacggtgacaccgccagcctggtaagtctggccaccacgtcatcgatggagaaacaacgtctggcacatgtctccattggtcatgtaactatgcgaaacctgccgatggtccagactatcctgacggggattgccattggtatattcccgctcctgatactggcggctgtctttaacaagctgacattgtctgtattaaaggggtatgtgtttgccctgatgtggctgcagacctggccgttgttgtatgccattctgaacagtgccatgacattctatgcgaaacagaatggtgcgccggtcgtgttgtctgaactctctcagatacagctgaaatactctaacctggcctccactgccgggtatctttcagccatgatccccccgttgtcatggatgatggtaaaaggccttggcgcaggtttttccagcgtgtacagccacttcgcctcttcatctatcagtccaacggccagtgcagcaggcagtgtggttgacggtaattactcctacggcaacatgcagacggaaaacgtgaacggcttcagctggagcaccaacagcaccacgtcgtttggtcagatgatgtaccagaccggcagtggcgcaaccgccacacagacccgtgacggtaatatggtgatggatgcaagcggagcgatgtcccggttaccggtcggtatcaatgcaacgcgtcagattgcagcggcacaacaggaaatggcccgggaggcgtcgaacagagccgaaagtgccctgcatggtttcagcagcagtattgccagtgcctggaacacactcagtcagtttggctctaaccgggggagcagtgactctgtcactggtggtgctgacagcacgatgagtgctcaggactccatgatggccagccgtatgcgcagtgcagtggaaagctatgcgaaggcgcataatatcagtaatgagcaggcgacgagagaactggcctcgagaagtacaaatgcgtcgcttggcctttacggtgatgcttatgctaaagggcatttaggcataagtgtattgggtaacggtggaggggttggtctccaggccggagctaaggcaagcattgatggcagtgatcttgactcacatgaagccagtagtggttcacgggccagccatgatgctcgtcatgatatcgatgccagagctacacaagactttaaagaagccagcgattactttaccagccgcaaagtcagtgaatccggcagccatactgacaataatgctgattcccgtgtggatcagttgtctgcagccctgaattcagcgaaacagagttacgaccagtacacgacgaatatgacccgcagccatgaatatgctgaaatggcatcccgtactgagagtatgagtgggcagatgagtgaagatctgtcgcaacagtttgcacagtatgtgatgaaaaacgcaccgcaggatgttgaagctattctgacaaataccagttcgccggagattgcagaacgccgtcgggctatggcgtggtcttttgtgcaggaacaggtacagcctggtgttgataacacctggcgtgaatcccgtagagatataggtaaaggaatggagagcgtaccttcgggtggtggcagccaggatattattgctgatcatcagggacatcaggccattattgagcaaagaacgcaggacagtaatatccgtaatgatgtaaaacatcaggttgataatatggtcacagaatatcgaggtaatatcggagatactcagaacagcatccgaggcgaggaaaatattgtaaaagggcagtattctgaactacaaaatcatcataaaacagaagcattaactcagaataataaatataatgaagaaaagctggctcaggaaagaatacctggtgctgatagtccgaaagagcttttagagaaagcaaagagttaccagcataaagaataatcataacatgttgggtagggtatggagagaccatgattacacaacaaattatcagtagtgagttggaagttttaaagaaacatattgactcaggagatattagaattccgtcactatggcagggattaaaacccgggcttatcatcatggggtggatgattttttgtcccttgctaatgtcatttctaataacacaaaagacaagtgaaacactcactgctgtgttagccggaggatggcttggacttattattctgtttattgtggcaaggattagaatgttatatttctctctgccggaagaattcctaaagacatcatccgtaatgagggttatatcatcaaaacttaaagtgtatttcattgtgtatatgggagttatatttttatggtcttttttaggtggagggattatatacggttttggcgcaattttagtgacggttattatggcgttcttgattcaattagatatcggtagatatcaatttgttggtgttattgatgcaatcaatagttacgtcaaaaacaagaagttatcaagagtaaaataaaagatattagagagtaaatatatgatgaaaacaaaaaaactaatgatggttgcactggtcagttccactctggccctttcagggtgtggtgcgatgagcacagcaatcaagaagcgtaaccttgaggtgaagactcagatgagtgagaccatctggcttgaacccgccagcgaacgcacggtatttctgcagatcaaaaacacgtctgataaagacatgagtgggctgcagggcaaaattgctgatgctgtgaaagcaaaagggtatcaggtggtgacttctccggataaagcctactactggattcaggcgaatgtgctgaaggccgataagatggatctgcgggagtctcagggatggctgaaccgtggttatgaaggcgcagcagttggtgcagcgttaggtgccggtatcaccggatataattccaattctgccggtgccacactcggtgtgggccttgctgccggtctggtgggtatggctgcagatgcgatggtggaagatgtgaactataccatgatcacggatgtgcagattgcagagcgtactaaggcaacggtgacaacggataatgttgccgccctgcgtcagggcacatcaggtgcgaaaattcagaccagtacagaaacaggtaaccagcataaataccagacccgtgtggtctcaaatgcgaacaaggttaacctgaaatttgaagaggcgaagcctgttctcgaagaccagctggccaaatcaatcgcaaatattctctgattatcttccggaggctggtctgaccggcctcctgactgacgcctcgctttgctcgttgtccaaccccggaaagaaataaaataaattttatttctccccggcgtttccgaaataaatatgaaaacactgagcggttgtgcaaattctttgtgcgaccgtgaagtgttgccggcgaagccggaatttaacggttattaatcttttcatcattaataatcagtccgactgactttttttcttcggaatatcatcatgagttttaacgcaaaggatatgacccagggcggtcagattgcgtccatgcgtatccgcatgttcagccagatcgccaatatcatgctttactgcctgtttatttttttctggatactcgttggtctggttttatggataaaaataagctggcagacgtttgtgaacggctgtatttactggtggtgtaccacgctggaaggcatgcgggatttaatcaaatcccagccggtctatgagatccagtattacggtaaaaccttccgcatgaacgctgctcaggtactgcatgacaaatatatgatctggtgcagtgagcagttatggtccgccttcgtgctggctgctgttgtggcactggttatttgcctgattaccttctttgttgtctcctggattctggggcgtcagggtaaacaacagagcgaaaatgaagtcacaggtggtcgtcagctgacagacaatccgaaagacgttgcccggatgctgaaaaaagacggcaaggactccgatatccggattggagacctgccgattatccgggattccgaaatccagaacttctgtctgcacggcacggtcggggccggtaagtcggaagttatccgtcgtctggccaactacgcccgtcagcgcggtgatatggtggtgatttatgaccgttcgggggaatttgttaaaagttactatgatccctccatcgataaaatcctgaatccgctggatgcccgctgtgccgcctgggatttgtggaaggagtgcctgacacagccggattttgataataccgcaaatactctgatcccgatgggtacaaaagaggacccgttctggcagggttcaggacgtaccatttttgcggaagcggcgtatctgatgcgtaatgaccccaaccgcagctacagcaaactggtggacacactgctttccatcaaaattgaaaaactgcgtacctacctgcgtaattcaccggcggccaacctggtggaagagaaaattgagaaaacggcgatttccatccgtgctgtgctgaccaactacgtgaaagccatccgttacctgcaggggattgagcataacggtgagccttttaccatccgtgactggatgcgtggtgtccgggaagatcagaaaaacggctggctgtttatttcgtcgaatgccgacacccatgcctccctgaagccggtgatctccatgtggctgtccattgccattcgtggtctgctggcaatgggagaaaaccgtaaccgtcgtgtgtggtttttctgtgatgagttacccacgttacacaaactgccggacctggtggagatcctgccggaagcccgtaagttcggtggctgttatgtgtttggtatccagtcctatgcccagctggaagatatctacggtgagaaagcggctgcctcgctgtttgacgtcatgaacacccgtgcctttttccgttctcccagccataagattgcagagttcgctgccggtgaaattggtgagaaagagcacctgaaagccagcgagcagtattcctacggtgctgatccggtacgtgacggggtatcgaccggtaaggatatggagcgccagacgctggtcagttattccgacattcagtctctgccggatctgacctgttatgtcaccctgcccggaccgtatccggcagtaaaactctctctgaaatatcagacacgaccgaaggtcgctccggagtttattccgcgtgacatcaacccggaaatggagaaccgtctgagtgccgtacttgccgcaagggaagcagaaggtcgtcagatggccagcctcttcgaaccggatgtcccggaggttgtttccggagaagacgtgactcaggctgaacagccgcaacagccggtgtctcctgccatcaacgataagaagtcagattcaggtgtgaatgttccggcaggggggatcgagcaggagctgaaaatgaaaccggaagaagagatggaacagcaactgccacccgggatcagtgaatccggtgaagtggtggatatggccgcttatgaggcatggcaacaggaaaatcatccggacatccagcagcagatgcagcgtcgtgaagaggtgaacattaatgtgcaccgggagcgcggggaggatgttgagccgggagatgatttctgatgaacaggtcaactccagtcttcaattctcaggccgcccacacgttcaaattcccgggtgttattagtcacaataatcagtccccgactgcgggcatgacctgcgatcatttgatcaaatggcccgacagggcgtccctgaagggcaagttctgctcttatctggccggtgtgtgtggcagcagcagcgtcgtaatccagaacgtcaatgcgggaaacaaatccctcgatcacagcgagattacgttcaggcatctggcttttttctgcaccatatatcacctccatcagagtgaccgaactgatgcacattctcccctggttcaggttaaaacgttccctgacactggcgggtttgttctttatcgtaaaaatgcagatgttggtatcgagcataaacttcagcatcagaatgactccctttcctgcataccaggctgttccctgttatccataaaatcagcgctgacactgtttccgtcgaaccattcgtcccatgtctctccggcaggcgtaatgattcgggttcgtccgacagcaatcacttcaacgcgttttacgttttccggcaatgcaaccgcttttggcagtctgaccgcctggctgcggttgctgagaaatacggtggtttccattatttgcctccttatgtggatatgtcttgtgtatatccattgtgggattgatgccgggatatgtcaaagggatatacgtttatgatgagtattgcgcaggtcagatcggccggaagtgccgggaactattataccgacaaggataattactatgtgctgggcagcatgggagaacgctgggccggcaggggggctgaacagctggggctgcagggcagtgtcgataaggatgtttttacccgtcttctggagggcaggctgccggacggagcggatctaagccgcatgcaggatggcagtaacaggcatcgtcccggctacgatctgaccttctccgcccccaaaagtgtctccatgatggccatgttaggtggcgataagcgcctgattgatgcacataatcaggccgtggattttgctgtccgtcaggtggaggcgctggcctccacacgggtgatgacggacggacagtcagaaacggtgctgaccggtaatctggtgatggcactgtttaaccacgacaccagtcgcgatcaggaaccacagttacacacgcatgcggtggtggctaatgtcacgcagcataatggcgaatggaagacactgagcagtgacaaagtggggaaaacggggttcattgagaatgtgtacgctaatcagattgcctttggcaggctctaccgggaaaaactgaaagagcaggttgaggcgctgggctatgaaactgaagtggttggtaagcacggtatgtgggaaatgccgggtgtaccggtggaggccttttccggacgctcacagactatccgggaggccgtcggggaagacgcctcgctgaaatcccgggatgtggcggcgctggatacgcgtaaatccaaacagcatgtcgatccggagatcaaaatggccgagtggatgcagacgctgaaggaaaccgggttcgacatccgggcatatcgtgacgcggcggatcagcgtgcggatctccgcacgctgacgcccgggcctgcttcacaggacgggccggatgtgcagcaggcggtgacacaggcgattgccggattaagtgaacgaaaagtgcagttcacgtacacggacgtactggccagaacggtcggcatactgccgccggaaaatggtgtgattgaacgggcacgcgccggtatcgatgaggccatcagccgtgagcagcttatccccctcgaccgtgagaaggggctgttcacgtccgggattcatgtgctcgatgagctgtcagtccgggcactcagtcgtgacatcatgaaacagaaccgggtgaccgtacatccggagaaaagtgttccccggacggccggttacagcgatgccgtcagcgtgctggcacaggatcgcccgtcgctggccattgtgtccgggcagggcggtgcagccgggcagcgtgagcgggtggctgaactggtcatgatggcccgggagcaggggcgggaggtgcagattatcgctgctgaccgtcgctcgcagatgaacatgaagcaggatgaacggttgtccggtgagctgataaccggacgtcgtcagctgctggaaggcatggccttcacgccgggcagtactgttatcgttgaccagggcgaaaaactctccctgaaagagacgttaaccctgctggacggtgccgcacgtcataacgtacaggtcctgataaccgacagcgggcagcgaaccggtacaggcagtgcactgatggccatgaaggatgccggggtgaacacatatcgctggcaggggggagaacagcgaccggccaccatcatcagtgaaccggaccgtaatgtccgctatgcccggctggcaggagattttgcggccagcgtgaaagccggagaagagagcgtggcacaggtcagcggggtacgggaacaggccatactgacacaggccattcgcagtgagctgaaaacacagggcgtgctcggactcccggaggtgaccatgactgccctttcaccggtctggctggacagccggagccgttatctgcgggatatgtaccgtccggggatggtgatggagcagtggaacccggagacacgcagtcatgaccgctatgttatcgaccgggtgacggcgcagagtcacagcctgaccctgcgggatgcgcagggtgaaacgcaggtggtgcgtatttcctccctggacagcagctggtcgctgttccggccggaaaaaatgccggtggcagacggcgagcgactgagggtgacagggaaaattcccggactccgcgtctccggcggtgaccgcctgcaggtggcatccgtcagtgaagatgcgatgacggttgttgtgccgggacgggctgaaccggccaccctgcctgtgagcgattcaccgttcacggcactgaagctggagaacggctgggtggaaacgcccgggcattccgtcagcgacagtgcgacggtttttgcctccgtcacacagatggcaatggacaatgccaccctgaacggtctggcccgcagtggtcgtgatgtccggctgtattcctcactggatgaaacccgtactgcggaaaaacttgcccgccatccgtcctttacggtggtttctgagcagataaagacgcgggccggtgagacatcgctggaaacggctatcagtcatcagaagtccgcacttcacacgccggcacagcaggccattcatcttgcccttccggtggtggaaagtaaaaaactggccttcagcatggtggacctgctgacagaggcaaagtcgtttgctgcagaaggaaccggttttactgaactgggaggggaaatcaatgcgcagataaaacggggtgatttactgtatgtggatgtggcaaaaggctatggcacaggtctgctggtttcccgtgcgtcgtatgaggcagaaaagagcattcttcgccatattctcgaaggtaaggaggcggtcatgccgctgatggagagagtacctggcgaactcatggagaaactgacatcaggacagcgtgccgccacccgcatgatactggaaacgtccgaccgtttcacggtggtacagggctatgccggtgtgggtaagaccacacagttccgggcggtgatgtcagccgtgaacatgctgccggagagtgagcgtccccgagtcgtggggctgggtcccacacaccgtgcggtcggggagatgcgcagcgccggcgtggatgcgcagacactggcgtcctttctgcatgacacgcagctgcagcagcgcagcggagaaacgccggatttcagcaacacgctgttcctgctcgatgagagctcaatggtgggcaataccgacatggcacgggcatacgccctgattgcggccggtggcggtagggcggtggccagtggtgacacggaccagctgcaggccatcgcgcccggtcagcctttccgtctccagcagacgcgcagtgctgccgatgtggccatcatgaaggagattgtgcgtcagacgccggaactgcgggaggcggtatacagcctgattaaccgggatgtggaaagggcactgtccgggcttgagagtgtgaaaccgtctcaggtgccacgtcaggagggcgcatgggcaccggagcactccgtgacggagttcagtcacagccaggaagcgaaactggcagaagcgcagcagaaggcgatgctgaaaggcgaggcttttccggatgtccccatgacactgtatgaagccattgtccgcgactataccggcagaacaccggaagcacgggagcagacgctgattgtcacgcacctgaatgaggaccggcgcgtactgaacagcatgattcatgatgtacgggaaaaggccggtgagctggggaaagagcaggtcatggtgcctgtcctgaacacagcgaatatacgtgacggggagctgcgtcgtctctccacctgggagacacatcgggacgcacttgtcctggtggataatgtgtatcaccggattgccggtatcagtaaggatgacgggctgataaccctgcaggatgcggaaggtaacacgcggttgatttctccccgggaggcggtggctgaaggtgtcacactgtacaccccggacaccatcagggtggggaccggtgaccggatgcgcttcacgaagagtgaccgggagcgcggttatgtggccaacagcgtctggacggtgacagcagtttccggtgacagtgtcacgctgtcggacggacagcagacccgggagattcgccccggccaggagcaggcagagcaacatattgacctggcctatgccatcaccgctcacggtgcgcagggggcaagtgaaacctttgccattgcgcttgaaggaacggaaggtaaccggaaactgatggccggctttgagtcagcctacgtggccctgtcgcgtatgaagcagcatgtgcaggtgtacaccgataaccgtcagggctggacggatgccattaacaatgccgtacagaaaggaacggcccacgatgtatttgagccgaaaccggaccgggaggtcatgaatgcagagcggctgttcagtacggcgcgggaactgcgggacgtggcggcagggcgtgctgttctccgtcaggcggggctggccgggggagacagtccggcacggtttattgcaccggggcgcaaatatccgcagccgtatgtggcactgccggcgtttgaccgtaacggcaagtcagcaggtatctggctgaacccactgaccacggatgacggaaacgggctgcggggattcagtggtgaaggacgggtgaaaggcagcggggatgcgcagttcgtggccctgcagggcagccgtaacggagagagcctgctggctgataatatgcaggatggtgtccggattgcccgtgataatcctgacagcggtgtggtggtgagaatcgccggtgaaggtcgtccgtggaatcccggtgccatcaccggtggtcgcgtgtggggggatatcccggacaacagtgtccagccgggagccggaaatggcgaaccggtcacggcagaggtgctggcacagcggcaggctgaagaggccatccgtcgtgaaacggaacgccgcgcagatgaaattgtccgtaaaatggcagagaacaaacctgacctgccggatggcaaaacagagcaggctgtcagggagattgccgggcaggagcgtgaccgggctgccataactgaacgggaagccgcgctgccggagggtgtactgcgtgaacctcaacgggtgcgggaagctgtcagggaaattgcccgggaaaatctgctgcaggagcgacttcagcagatggagcgggatatggtccgcgacctgcagaaagagaaaaccctgggtggagactgatacaggaagacaaacgctgatgacaacggataacacgaacacgacacgtaacgattcactggttgcccggaccgatacctggttgcagtcgttgctggtctggtcacccggacagcgggatatcatcaaaacggtggcactggtgctgatggttctggaccatgcaaaccgtattctgcatctggaccagtcgtggatgtttctagccgggcgcggggcctttccgctgtttgccctggtgtgggggctgaatctgtcccgtcatgcgcatatccggcaactggccattaaccggctgtggggatgggcagttttttcccagttctggtattactttgccggctttccctggtatgaggggaatatcctgtttgcctttgcagtggcggcacaggtgctgacatggtgtgaaacgcgcagtgggtggcgtactgcagcggccattctcatgatggcactgtgggggcctttgtccggcaccagttacggcattgccgggctgctgatgctggctgtcagccaccggctgtaccgggcggaagacagaatggaacgtctggtgcttgtcgcttgcctgctggccgtgattccggcgcttaaccttgccaccagtgatgcggcggctgtagccggccttgtgatgacggtgctgaccgttggtctggtgtcgtgtgcagggaaattattatcccgtttctggcccggagactttttcccgacgttctatgcctgtcatctggctgtgctgggcgttctggcgctgtgacgggtgtggtatctttggccgcaagaggatgattcgcccaatacgcaaaccgcctctccccgcgcgttggccgattcattaatgcagctggcacgacaggtttcccgactggaaagcgggcagtgagcgcaacgcaattaatgtgagttagctcactcattaggcaccccaggctttacactttatgcttccggctcgtatgttgtgtggaattgtgagcggataacaatttcacacaggaaacagctatgaccatgattacggattcactggccgtcgttttacaacgtcgtgactgggaaaaccctggcgttacccaacttaatcgccttgcagcacatccccctttcgccagctggcgtaatagcgaagaggcccgcaccgatcgcccttcccaacagttgcgcagcctgaatggcgaatggcgctttgcctggtttccggcaccagaagcggtgccggaaagctggctggagtgcgatcttcctgaggccgatactgtcgtcgtcccctcaaactggcagatgcacggttacgatgcgcccatctacaccaacgtgacctatcccattacggtcaatccgccgtttgttcccacggagaatccgacgggttgttactcgctcacatttaatgttgatgaaagctggctacaggaaggccagacgcgaattatttttgatggcgttaactcggcgtttcatctgtggtgcaacgggcgctgggtcggttacggccaggacagtcgtttgccgtctgaatttgacctgagcgcatttttacgcgccggagaaaaccgcctcgcggtgatggtgctgcgctggagtgacggcagttatctggaagatcaggatatgtggcggatgagcggcattttccgtgacgtctcgttgctgcataaaccgactacacaaatcagcgatttccatgttgccactcgctttaatgatgatttcagccgcgctgtactggaggctgaagttcagatgtgcggcgagttgcgtgactacctacgggtaacagtttctttatggcagggtgaaacgcaggtcgccagcggcaccgcgcctttcggcggtgaaattatcgatgagcgtggtggttatgccgatcgcgtcacactacgtctgaacgtcgaaaacccgaaactgtggagcgccgaaatcccgaatctctatcgtgcggtggttgaactgcacaccgccgacggcacgctgattgaagcagaagcctgcgatgtcggtttccgcgaggtgcggattgaaaatggtctgctgctgctgaacggcaagccgttgctgattcgaggcgttaaccgtcacgagcatcatcctctgcatggtcaggtcatggatgagcagacgatggtgcaggatatcctgctgatgaagcagaacaactttaacgccgtgcgctgttcgcattatccgaaccatccgctgtggtacacgctgtgcgaccgctacggcctgtatgtggtggatgaagccaatattgaaacccacggcatggtgccaatgaatcgtctgaccgatgatccgcgctggctaccggcgatgagcgaacgcgtaacgcgaatggtgcagcgcgatcgtaatcacccgagtgtgatcatctggtcgctggggaatgaatcaggccacggcgctaatcacgacgcgctgtatcgctggatcaaatctgtcgatccttcccgcccggtgcagtatgaaggcggcggagccgacaccacggccaccgatattatttgcccgatgtacgcgcgcgtggatgaagaccagcccttcccggctgtgccgaaatggtccatcaaaaaatggctttcgctacctggagagacgcgcccgctgatcctttgcgaatacgcccacgcgatgggtaacagtcttggcggtttcgctaaatactggcaggcgtttcgtcagtatccccgtttacagggcggcttcgtctgggactgggtggatcagtcgctgattaaatatgatgaaaacggcaacccgtggtcggcttacggcggtgattttggcgatacgccgaacgatcgccagttctgtatgaacggtctggtctttgccgaccgcacgccgcatccagcgctgacggaagcaaaacaccagcagcagtttttccagttccgtttatccgggcaaaccatcgaagtgaccagcgaatacctgttccgtcatagcgataacgagctcctgcactggatggtggcgctggatggtaagccgctggcaagcggtgaagtgcctctggatgtcgctccacaaggtaaacagttgattgaactgcctgaactaccgcagccggagagcgccgggcaactctggctcacagtacgcgtagtgcaaccgaacgcgaccgcatggtcagaagccgggcacatcagcgcctggcagcagtggcgtctggcggaaaacctcagtgtgacgctccccgccgcgtcccacgccatcccgcatctgaccaccagcgaaatggatttttgcatcgagctgggtaataagcgttggcaatttaaccgccagtcaggctttctttcacagatgtggattggcgataaaaaacaactgctgacgccgctgcgcgatcagttcacccgtgcaccgctggataacgacattggcgtaagtgaagcgacccgcattgaccctaacgcctgggtcgaacgctggaaggcggcgggccattaccaggccgaagcagcgttgttgcagtgcacggcagatacacttgctgatgcggtgctgattacgaccgctcacgcgtggcagcatcaggggaaaaccttatttatcagccggaaaacctaccggattgatggtagtggtcaaatggcgattaccgttgatgttgaagtggcgagcgatacaccgcatccggcgcggattggcctgaactgccagctggcgcaggtagcagagcgggtaaactggctcggattagggccgcaagaaaactatcccgaccgccttactgccgcctgttttgaccgctgggatctgccattgtcagacatgtataccccgtacgtcttcccgagcgaaaacggtctgcgctgcgggacgcgcgaattgaattatggcccacaccagtggcgcggcgacttccagttcaacatcagccgctacagtcaacagcaactgatggaaaccagccatcgccatctgctgcacgcggaagaaggcacatggctgaatatcgacggtttccatatggggattggtggcgacgactcctggagcccgtcagtatcggcggaattccagctgagcgccggtcgctaccattaccagttggtctggtgtcaaaaataataataaccgggcaggccatgtctcttgcgctcgttcgccagccaggacagaaatgcctcgacttcgctgctgcccaaggttgccgggtgacgcacaccgtggaaacggatgaaggcacgaacccagtggacataagcctgttcggttcgtaagctgtaatgcaagtagcgtatgcgctcacgcaactggtccagaaccttgaccgaacgcagcggtggtaacggcgcagtggcggttttcatggcttgttatgactgtttttttggggtacagtctatgcctcgggcatccaagcagcaagcgcgttacgccgtgggtcgatgtttgatgttatggagcagcaacgatgttacgcagcagggcagtcgccctaaaacaaagttaaacatcatgagggaagcggtgatcgccgaagtatcgactcaactatcagaggtagttggcgtcatcgagcgccatctcgaaccgacgttgctggccgtacatttgtacggctccgcagtggatggcggcctgaagccacacagtgatattgatttgctggttacggtgaccgtaaggcttgatgaaacaacgcggcgagctttgatcaacgaccttttggaaacttcggcttcccctggagagagcgagattctccgcgctgtagaagtcaccattgttgtgcacgacgacatcattccgtggcgttatccagctaagcgcgaactgcaatttggagaatggcagcgcaatgacattcttgcaggtatcttcgagccagccacgatcgacattgatctggctatcttgctgacaaaagcaagagaacatagcgttgccttggtaggtccagcggcggaggaactctttgatccggttcctgaacaggatctatttgaggcgctaaatgaaaccttaacgctatggaactcgccgcccgactgggctggcgatgagcgaaatgtagtgcttacgttgtcccgcatttggtacagcgcagtaaccggcaaaatcgcgccgaaggatgtcgctgccgactgggcaatggagcgcctgccggcccagtatcagcccgtcatacttgaagctagacaggcttatcttggacaagaagaagatcgcttggcctcgcgcgcagatcagttggaagaatttgtccactacgtgaaaggcgagatcaccaaggtagtcggcaaataatgtctaacaattcgttcaagccgacgccgcttcgcggcgcggcttaactcaagagaggaagagtaaggatggaacgggatatattttctgcgatattaccgaaaccgtatcgatcctcaggtacatcttcaactgccgcatcaagccctttctggttccacagctgcctcagtatcttcatattacagatctccgtacaggcagcgcagcccggtcagggcctccgccagcgggccttcttgacaccgcgtggcgagctcccggaccagcgtctcaaaggcctccgccggcataaaaatccgcaggccgtctatcccgaagaagccctccggcgtgacgtttccgggcggggagaacatcactcgctccccctggtgaccgtgcgtcagggcttccggatgccgggcatacagcgtgaacaggcccagcagttcggataacgcttcccagccgtacggcaccacgaagtcctggccggtgatcagcaggtgcagacggggtgtggtgtaccaggcccccgggcgttctccggggtgctggccgtcaacgcggatctccaggcgcagcgtgccggcctcaatggtttccgtgacggcagaaataaccgggcgcagctcctgtgccagcgttcttgcctgttctgtgttccagtccaggccgcgcagcatcaacgggaaaacagctttcagccgcggcagggtgaagatttctgccagcaccgcgtccggcacctccgccaggccaaaacagtcgctctcgagcggacgcaggaggtgttcggcatacatctgatccaccacggggcgcagcgctgcccggaaggcttcaaactcttccgtccagtttttcccggccaggcggaaaatccccttcaggtagtgaccgtccacagggcgatcgtgctccacctgccaggccagcaggttgccagtgatgtccagcagcgtgtccagggccgggagtgtggccagcctattatgcccgcgcaggaaggcctccctgacgtgaaccaggacaaagcgcagttcgtcgcgggagagcgctgacgtgccgaaggtctggcccagaatgatatgccggtacagctgccggaccgtggcctccggatcggcaatgagctgaaaatacccgtcaccgggcgcgaccgttttcaggccgtcatcgaggaagcgttcggctagggcgttgaccgaagtattttcccgaccggcacgcgttttcagcgcctcgataagttttttgtgaaaacgcaggttaagctggcttagcatcatcgatcctttaatgtttgttttgttcttaatgctaacctagcattttattattagctattaatcagttttttagtttttgaaaattgtgatgcttctaaaattactaaaattgaggattttaatgctacaacaatgcctgcctcttcttatttctccggagatccgaaaaccccaagttacggatcttcctctccctccgcacagcgttacatcccgtcagcacagcatgtagtgcctcatacagttgcccatggcactatatgttgtgttgtatctctggactgtgatgcgccgcgcaggggcggaaaacagcgatatgatgattttctcagcgttgtacacttccggaaagtcgtttattcaaataaagtcggatccatacgaaacgggaatgcggtaattacgctttgtttttataagtcagattttaatttttattggttaacataacgaaaggtaaaatacataaggcttactaaaagccagataacagtatgcgtatttgcgcgctgatttttgcggtataagaatatatactgatatgtatacccgaagtatgtcaaaaagaggtgtgctatgaagcagcgtattacagtgacagttgacagcgacagctatcagttgctcaaggcatatgatgtcaatatctccggtctggtaagcacaaccatgcagaatgaagcccgtcgtctgcgtgccgaacgctggaaagcggaaaatcaggaagggatggctgaggtcgcccggtttattgaaatgaacggctcttttgctgacgagaacagggactggtgaaatgcagtttaaggtttacacctataaaagagagagccgttatcgtctgtttgtggatgtacagagtgatattattgacacgcccgggcgacggatggtgatccccctggccagtgcacgtctgctgtcagataaagtctcccgtgaactttacccggtggtgcatatcggggatgaaagctggcgcatgatgaccaccgatatggccagtgtgccggtctccgttatcggggaagaagtggctgatctcagccaccgcgaaaatgacatcaaaaacgccattaacctgatgttctggggaatataaatgtcaggctccgttatacacagccagtctgcagtcatggtaccggcagtgtattctgccgggcagcctgcatcgctgcctgttgccattgattatccggcagctctggcacttcgccagatgtcgatggtccatgatgaactgccaaaatatctgctggctccggaagtgagtgccctgctccattacgtcccggatctgcaccgcaagatgctgctggccacactgtggaacaccggagcacgcattaatgaagcactggcgctgacgcggggggatttttcgcttgcgcctccgtatccgtttgtgcagcttgcgaccctgaaacaacggaccgaaaaagctgccaggacggcggggagaatgcccgccggtcagcagactcaccggctggttccgctctctgactcctggtacgtcagccagctgcagacgatggtggcaacactgaaaatacccatggagcggcgtaaccgtcgcacaggaaggacagagaaagcgcggatctgggaagtgacggacagaacggtcaggacctggattggggaggcggttgccgccgctgctgctgacggtgtgacgttctctgttccggtcacaccacatacgttccgccattcctatgcgatgcacatgctgtatgccggtataccgctgaaagttctgcaaagcctgatgggacataagtccatcagttcaacggaagtctacacgaaggtttttgcgctggatgtggctgcccggcaccgggtgcagtttgcgatgccggagtctgatgcggttgcgatgctgaaacaattatcctgagaataaatgccttggcctttatatggaaatgtggaactgagtggatatgctgtttttgtctgttaaacagagaagctggctgttatccactgagaagcgaacgaaacagtcgggaaaatctcccattatcgtagagatccgcattattaatctcaggagcctgtgtagcgtttataggaagtagtgttctgtcatgatgcctgcaagcggtaacgaaaacgatttgaatatgccttcaggaacaatagaaatcttcgtgcggtgttacgttgaagtggagcggattatgtcagcaatggacagaacaacctaatgaacacagaaccatgatgtggtctgtccttttacagccagtagtgctcgccgcagtcgagcgacagggcgaagccctcgagtgagcgaggaagcaccagggaacagcacttatatattctgcttacacacgatgcctgaaaaaacttcccttggggttatccacttatccacggggatatttttataattattttttttatagtttttagatcttcttttttagagcgccttgtaggcctttatccatgctggttctagagaaggtgttgtgacaaattgccctttcagtgtgacaaatcaccctcaaatgacagtcctgtctgtgacaaattgcccttaaccctgtgacaaattgccctcagaagaagctgttttttcacaaagttatccctgcttattgactcttttttatttagtgtgacaatctaaaaacttgtcacacttcacatggatctgtcatggcggaaacagcggttatcaatcacaagaaacgtaaaaatagcccgcgaatcgtccagtcaaacgacctcactgaggcggcatatagtctctcccgggatcaaaaacgtatgctgtatctgttcgttgaccagatcagaaaatctgatggcaccctacaggaacatgacggtatctgcgagatccatgttgctaaatatgctgaaatattcggattgacctctgcggaagccagtaaggatatacggcaggcattgaagagtttcgcggggaaggaagtggttttttatcgccctgaagaggatgccggcgatgaaaaaggctatgaatcttttccttggtttatcaaacgtgcgcacagtccatccagagggctttacagtgtacatatcaacccatatctcattcccttctttatcgggttacagaaccggtttacgcagtttcggcttagtgaaacaaaagaaatcaccaatccgtatgccatgcgtttatacgaatccctgtgtcagtatcgtaagccggatggctcaggcatcgtctctctgaaaatcgactggatcatagagcgttaccagctgcctcaaagttaccagcgtatgcctgacttccgccgccgcttcctgcaggtctgtgttaatgagatcaacagcagaactccaatgcgcctctcatacattgagaaaaagaaaggccgccagacgactcatatcgtattttccttccgcgatatcacttccatgacgacaggatagtctgagggttatctgtcacagatttgagggtggttcgtcacatttgttctgacctactgagggtaatttgtcacagttttgctgtttccttcagcctgcatggattttctcatactttttgaactgtaatttttaaggaagccaaatttgagggcagtttgtcacagttgatttccttctctttcccttcgtcatgtgacctgatatcgggggttagttcgtcatcattgatgagggttgattatcacagtttattactctgaattggctatccgcgtgtgtacctctacctggagtttttcccacggtggatatttcttcttgcgctgagcgtaagagctatctgacagaacagttcttctttgcttcctcgccagttcgctcgctatgctcggttacacggctgcggcgagcgctagtgataataagtgactgaggtatgtgctcttcttatctccttttgtagtgttgctcttattttaaacaactttgcggttttttgatgactttgcgattttgttgttgctttgcagtaaattgcaagatttaataaaaaaacgcaaagcaatgattaaaggatgttcagaatgaaactcatggaaacacttaaccagtgcataaacgctggtcatgaaatgacgaaggctatcgccattgcacagtttaatgatgacagcccggaagcgaggaaaataacccggcgctggagaataggtgaagcagcggatttagttggggtttcttctcaggctatcagagatgccgagaaagcagggcgactaccgcacccggatatggaaattcgaggacgggttgagcaacgtgttggttatacaattgaacaaattaatcatatgcgtgatgtgtttggtacgcgattgcgacgtgctgaagacgtatttccaccggtgatcggggttgctgcccataaaggtggcgtttacaaaacctcagtttctgttcatcttgctcaggatctggctctgaaggggctacgtgttttgctcgtggaaggtaacgacccccagggaacagcctcaatgtatcacggatgggtaccagatcttcatattcatgcagaagacactctcctgcctttctatcttggggaaaaggacgatgtcacttatgcaataaagcccacttgctggccggggcttgacattattccttcctgtctggctctgcaccgtattgaaactgagttaatgggcaaatttgatgaaggtaaactgcccaccgatccacacctgatgctccgactggccattgaaactgttgctcatgactatgatgtcatagttattgacagcgcgcctaacctgggtatcggcacgattaatgtcgtatgtgctgctgatgtgctgattgttcccacgcctgctgagttgtttgactacacctccgcactgcagtttttcgatatgcttcgtgatctgctcaagaacgttgatcttaaagggttcgagcctgatgtacgtattttgcttaccaaatacagcaatagtaatggctctcagtccccgtggatggaggagcaaattcgggatgcctggggaagcatggttctaaaaaatgttgtacgtgaaacggatgaagttggtaaaggtcagatccggatgagaactgtttttgaacaggccattgatcaacgctcttcaactggtgcctggagaaatgctctttctatttgggaacctgtctgcaatgaaattttcgatcgtctgattaaaccacgctgggagattagataatgaagcgtgcgcctgttattccaaaacatacgctcaatactcaaccggttgaagatacttcgttatcgacaccagctgccccgatggtggattcgttaattgcgcgcgtaggagtaatggctcgcggtaatgccattactttgcctgtatgtggtcgggatgtgaagtttactcttgaagtgctccggggtgatagtgttgagaagacctctcgggtatggtcaggtaatgaacgtgaccaggagctgcttactgaggacgcactggatgatctcatcccttcttttctactgactggtcaacagacaccggcgttcggtcgaagagtatctggtgtcatagaaattgccgatgggagtcgccgtcgtaaagctgctgcacttaccgaaagtgattatcgtgttctggttggcgagctggatgatgagcagatggctgcattatccagattgggtaacgattatcgcccaacaagtgcttatgaacgtggtcagcgttatgcaagccgattgcagaatgaatttgctggaaatatttctgcgctggctgatgcggaaaatatttcacgtaagattattacccgctgtatcaacaccgccaaattgcctaaatcagttgttgctcttttttctcaccccggtgaactatctgcccggtcaggtgatgcacttcaaaaagcctttacagataaagaggaattacttaagcagcaggcatctaaccttcatgagcagaaaaaagctggggtgatatttgaagctgaagaagttatcactcttttaacttctgtgcttaaaacgtcatctgcatcaagaactagtttaagctcacgacatcagtttgctcctggagcgacagtattgtataagggcgataaaatggtgcttaacctggacaggtctcgtgttccaactgagtgtatagagaaaattgaggccattcttaaggaacttgaaaagccagcaccctgatgcgaccacgttttagtctacgtttatctgtctttacttaatgtcctttgttacaggccagaaagcataactggcctgaatattctctctgggcccactgttccacttgtatcgtcggtctgataatcagactgggaccacggtcccactcgtatcgtcggtctgattattagtctgggaccacggtcccactcgtatcgtcggtctgattattagtctgggaccacggtcccactcgtatcgtcggtctgataatcagactgggaccacggtcccactcgtatcgtcggtctgattattagtctgggaccatggtcccactcgtatcgtcggtctgattattagtctgggaccacggtcccactcgtatcgtcggtctgattattagtctgggaccacggtcccactcgtatcgtcggtctgattattagtctgggaccacggtcccactcgtatcgtcggtctgattattagtctgggaccacgatcccactcgtgttgtcggtctgattatcggtctgggaccacggtcccacttgtattgtcgatcagactatcagcgtgagactacgattccatcaatgcctgtcaagggcaagtattgacatgtcgtcgtaacctgtagaacggagtaacctcggtgtgcggttgtatgcctgctgtggattgctgctgtgtcctgcttatccacaacattttgcgcacggttatgtggacaaaatacctggttacccaggccgtgccggcacgttaaccgggctgcatccgatgcaagtgtgtcgctgtcgacggcctcctcacccggtcacgtttcgtcgtttctcctccacgcgctgcggcttcggggccgcacctgcattcgtatgcggtcgcccggttacaggtgcggcacggcctgatggaggccgcatgtgagaggagaattcccatgccaaactggtgctcgaatcgtatgtatttttctggtgaaccggcacagatcgctgagattaaacgactggccagcggtgcagtcacaccgctttatcgccgcgccacaaatgaaggtattcagctgtttctggccggaagtgccggacttctgcagaccactgaagatgtgcggtttgaaccatgccccggactgacggctgctgggcgtggcgttgtatcgccggagaatatcgcgttcacccgctggctgacacacctgcaggacggtgtacttctggatgagcaaaactgcctgatgctgcatgaactctggctgcagagcggtactggccggcgtcgctgggaagaattaccggatgatgccagggaaagcattaccgctcttttcaccccaaaaagaggtgactggtgcgacatctggagtaacgaggatgtatcggtgtggtggaaccgtctgtgtgacaacgtcctgccggaaaaaccatgccgtttgacctgctgacggttctgttcactcgcctggatgttgaagtgaatggctttaacggtggtgttctgaacggtgttccttctgcatatcactggtatacggaacagtatggcgtgaaggggccttgtgggtatgaggtgaatatcagcagtcagggagacaacttcattcaggttgatttcgacacgccgtggtgtcagccggaaagcgacgttattgcagtattaagccgccgtttcagttgcacgctggagcactggtacgccgagcagggctgcaatttctgtggctggcagcgatatgagcgtggagagcttgttgatgtgctgtggggggaactggaatggtcttccccgacagatgatgatgagctgccggaagtcaccgcgccggagtggatagtcgacaaggtggcgcattacggtggatgaagtatgacggagactggcgggcaaccgcccgtttcttttccggtaaaggatgtcgccgggctcctctttttactgcgccggctgacgcggcgcggcaggaacgctgcctgtggtcagtgtcccgcgtccggctgggcacgggacgggcgcttttaccgctcccggctggcatcggtgacagtgtacgccagcccgtcgcccttttctgatgaacgcccttcaagccgctttcgcggcatattctcgccgtcaaaaagacgacggctgcgatattccacggtcggcctgacccgttaccggacgcggtgaacagcccacaggccgcggggaacgggcgccacaggggcgccctcccggtgccctctgtaagagaaggagtgctgttatgtcccgttttatccagggtgactgcgtgcgtgttatggccacgtttccgggcaatgctgtcgatttcatcctcaccgacccgccatatctcgtcggtttccgtgaccgtcaggggcgtaccatcgccggcgataaaaccgatgaatggctgcaaccggcctgtaatgaaatgtaccgcgtgctgaaaaaagatgcgctgatggtgagcttctatggctggaaccgcgtcgatcgctttatggccgcctggaaaaatgcgggattcagcgtggttggccacctggtgtttaccaaaacctacacatcgaaggccgcatatgtgggctatcgccacgaatgcgcttacatcctggcaaaagggcgtccggcgctgcctcagaagccattgcccgacgtgctgggctggaaatattcaggcaatcgtcatcacccgacggaaaagcctgttaccagcctgcaaccactgattgagagcttcacacacccgaacgcgattgtgctggacccgtttgcaggcagcggctcaacctgtgtggccgcccttcagtccggacgccggtatatcggtatcgagctgcttgaacagtatcaccgtgccggacagcaacgtctggctgccgtacagcgggccatgcagcagggggctgcaaatgatgactggtttatgccggaggctgcgtaaatgaactatgccggacataaaaaacttcgcgccgacgtggcggaggtggccaacaccatgtgtgaccttcgggccaggctgaacgatatggagcatcgctgtcgctttgattccgatgtgcttgttgaacgcctggcacgccagacgctgtatcgcgccaatcgcctgttcatggaggcgtataccgaaattctggaactggatgcgtgctttaaagattgagaaggagacgagaatgtacggaacatgcgaaacgctatgccgggagctggcagcaaagtatccgggatatacaccgctgatgctggttatctggtccccggaagagattcaggccctcgctgacggaatggatatttccctgtccgatcctgaaatcaggaccgtcctggcgcgcctggaggacatcccggaagaccagcgaattgagtccggtatttcttctgccgcggcgatggagattatcagcaacgtgagcgaaaaccgccaggtgaccgtcccggctgaactgctggcgtccctgattcagaccgccgaacaggcactgtggaaacgtgaatgggccgcccgtgattacggcctcgccgtcccggaatgcgttacccgccgtcaggcggtggttaatcaggcccgcatcctgctgaaaaacaacacacacgaaaacggctgatgttatcgccgcctgcgggcggcgatacagggagaacgattaatcatgaacgaaaacacaacgctgaacgcactgatttgtcgtcacgcccgtaacctgctgctggcgcagggctggccggaagagacggatgtcgaccagcgtaacccgaagtatccgggctggatcagcatttatgttctgctggatgcgccccggctggcgacgttactcgttaaccgccacggcggcgtactgccgccgcacctggcctccgccattcagaaactgaccggaaccggagcggaacttgttctgtccggcagtcagtggcagtcgctgccggtgcttccggcagacggaacgcaggtgtcttttccgtatgccggtgaatggctgaccgaagacgaaatcagggctgtacttg

SEQ ID NO: 5617 - DNA, 30000 bp, Artificial Sequence
  Description of Artificial Sequence: Synthetic polynucleotide
tgacagcgtcagggataaagccagcgacaaggataaggagcgggtgaccaaaaacatcaacatcatgtggaatgcgctttccaaaaacagaatgtttgacggcaacaaagagctgaaagagtttgtgatgacgctgaccggctcactggtgtttggtcccaacggcgaaatcacaccgctgtcagccagaaccactgaccgttcaattatccgggccatgatggaaggcggcacagcaaaaatttctcactgcaacgattctgataaatgcctgaaagtggtggcagacacaccggtgaccatcagccgggataatgcactgaagtctcagattactaaacttctggccagcattcagaacaaggctgtcagtgacacgcctctggatgacaaggaaaaaggctttatttccagtaccaccatccccgtcttcaaatacctggttgacccgcagatgctcggtgtttccaacagtatgatttaccagctgacggactatatcggttacgacatcctgctgcagtacattcaggagctgatacagcaggcacgggcgatggtggccacgggaaattatgacgaagcggttatcgggcatattaacgacaacatgaatgatgccacccggcagattgcggcgtttcagtcacaggtgcaggtacagcaggatgcgctgctggttgtcgatcgtcagatgagctacatgcgtcagcagctttccgcccgcatgctcagtcgttaccagaacaactatcacttcggagggagcacgctgtgaatgaagtttatgtgattgccggtggtgagtggttgcggaataacctgaacgccattgccgcctttatgggaacctggacgtgggattccattgaaaaaattgcgctcacattgtctgttctcgcggtggccgtaatgtgggtacagcggcacaacgtgatggatttgctgggctgggtggccgtgtttgtgcttatcagcctgctggttaatgtccgcacatcggtgcagattattgataacagtgacctggtcaaagttcaccgggtggataatgtgccggtcggtctggcgatgccactttcactgacgacccgtatcgggcatgcaatggtggccagttacgagatgatcttcacgcaaccggacagcgtcacctacagcaaaacggggatgctgttcggggcgaatctgattgtgaaaagcaccgatttcctgtcccggaatccggaaatcatcaatctgttccaggactacgtccagaactgcgtgctgggtgatatttacctgaatcataaatacacgctggaagacctgatggcctccgctgacccctacacgctgattttttcccgccccagcccgctacggggcgtttatgacaacaataataatttcataacttgtaaggatgcgtcggtcacgctgaaagacaggctgaatctcgatacaaagacgggaggcaagacctggcattattatgtgcagcagatatttggcggcagaccggacccggacctgttattcagacaactggtcagtgacagttacagttatttctacggctccagtcagtctgccagccagattatgcgccagaacgtcaccatgaatgccctgaaagagggtatcaccagtaatgcagcccgtaacggtgacaccgccagcctggtaagtctggccaccacgtcatcgatggagaaacaacgtctggcacatgtctccattggtcatgtaactatgcgaaacctgccgatggtccagactatcctgacggggattgccattggtatattcccgctcctgatactggcggctgtctttaacaagctgacattgtctgtattaaaggggtatgtgtttgccctgatgtggctgcagacctggccgttgttgtatgccattctgaacagtgccatgacattctatgcgaaacagaatggtgcgccggtcgtgttgtctgaactctctcagatacagctgaaatactctaacctggcctccactgccgggtatctttcagccatgatccccccgttgtcatggatgatggtaaaaggccttggcgcaggtttttccagcgtgtacagccacttcgcctcttcatctatcagtccaacggccagtgcagcaggcagtgtggttgacggtaattactcctacggcaacatgcagacggaaaacgtgaacggcttcagctggagcaccaacagcaccacgtcgtttggtcagatgatgtaccagaccggcagtggcgcaaccgccacacagacccgtgacggtaatatggtgatggatgcaagcggagcgatgtcccggttaccggtcggtatcaatgcaacgcgtcagattgcagcggcacaacaggaaatggcccgggaggcgtcgaacagagccgaaagtgccctgcatggtttcagcagcagtattgccagtgcctggaacacactcagtcagtttggctctaaccgggggagcagtgactctgtcactggtggtgctgacagcacgatgagtgctcaggactccatgatggccagccgtatgcgcagtgcagtggaaagctatgcgaaggcgcataatatcagtaatgagcaggcgacgagagaactggcctcgagaagtacaaatgcgtcgcttggcctttacggtgatgcttatgctaaagggcatttaggcataagtgtattgggtaacggtggaggggttggtctccaggccggagctaaggcaagcattgatggcagtgatcttgactcacatgaagccagtagtggttcacgggccagccatgatgctcgtcatgatatcgatgccagagctacacaagactttaaagaagccagcgattactttaccagccgcaaagtcagtgaatccggcagccatactgacaataatgctgattcccgtgtggatcagttgtctgcagccctgaattcagcgaaacagagttacgaccagtacacgacgaatatgacccgcagccatgaatatgctgaaatggcatcccgtactgagagtatgagtgggcagatgagtgaagatctgtcgcaacagtttgcacagtatgtgatgaaaaacgcaccgcaggatgttgaagctattctgacaaataccagttcgccggagattgcagaacgccgtcgggctatggcgtggtcttttgtgcaggaacaggtacagcctggtgttgataacacctggcgtgaatcccgtagagatataggtaaaggaatggagagcgtaccttcgggtggtggcagccaggatattattgctgatcatcagggacatcaggccattattgagcaaagaacgcaggacagtaatatccgtaatgatgtaaaacatcaggttgataatatggtcacagaatatcgaggtaatatcggagatactcagaacagcatccgaggcgaggaaaatattgtaaaagggcagtattctgaactacaaaatcatcataaaacagaagcattaactcagaataataaatataatgaagaaaagctggctcaggaaagaatacctggtgctgatagtccgaaagagcttttagagaaagcaaagagttaccagcataaagaataatcataacatgttgggtagggtatggagagaccatgattacacaacaaattatcagtagtgagttggaagttttaaagaaacatattgactcaggagatattagaattccgtcactatggcagggattaaaacccgggcttatcatcatggggtggatgattttttgtcccttgctaatgtcatttctaataacacaaaagacaagtgaaacactcactgctgtgttagccggaggatggcttggacttattattctgtttattgtggcaaggattagaatgttatatttctctctgccggaagaattcctaaagacatcatccgtaatgagggttatatcatcaaaacttaaagtgtatttcattgtgtatatgggagttatatttttatggtcttttttaggtggagggattatatacggttttggcgcaattttagtgacggttattatggcgttcttgattcaattagatatcggtagatatcaatttgttggtgttattgatgcaatcaatagttacgtcaaaaacaagaagttatcaagagtaaaataaaagatattagagagtaaatatatgatgaaaacaaaaaaactaatgatggttgcactggtcagttccactctggccctttcagggtgtggtgcgatgagcacagcaatcaagaagcgtaaccttgaggtgaagactcagatgagtgagaccatctggcttgaacccgccagcgaacgcacggtatttctgcagatcaaaaacacgtctgataaagacatgagtgggctgcagggcaaaattgctgatgctgtgaaagcaaaagggtatcaggtggtgacttctccggataaagcctactactggattcaggcgaatgtgctgaaggccgataagatggatctgcgggagtctcagggatggctgaaccgtggttatgaaggcgcagcagttggtgcagcgttaggtgccggtatcaccggatataattccaattctgccggtgccacactcggtgtgggccttgctgccggtctggtgggtatggctgcagatgcgatggtggaagatgtgaactataccatgatcacggatgtgcagattgcagagcgtactaaggcaacggtgacaacggataatgttgccgccctgcgtcagggcacatcaggtgcgaaaattcagaccagtacagaaacaggtaaccagcataaataccagacccgtgtggtctcaaatgcgaacaaggttaacctgaaatttgaagaggcgaagcctgttctcgaagaccagctggccaaatcaatcgcaaatattctctgattatcttccggaggctggtctgaccggcctcctgactgacgcctcgctttgctcgttgtccaaccccggaaagaaataaaataaattttatttctccccggcgtttccgaaataaatatgaaaacactgagcggttgtgcaaattctttgtgcgaccgtgaagtgttgccggcgaagccggaatttaacggttattaatcttttcatcattaataatcagtccgactgactttttttcttcggaatatcatcatgagttttaacgcaaaggatatgacccagggcggtcagattgcgtccatgcgtatccgcatgttcagccagatcgccaatatcatgctttactgcctgtttatttttttctggatactcgttggtctggttttatggataaaaataagctggcagacgtttgtgaacggctgtatttactggtggtgtaccacgctggaaggcatgcgggatttaatcaaatcccagccggtctatgagatccagtattacggtaaaaccttccgcatgaacgctgctcaggtactgcatgacaaatatatgatctggtgcagtgagcagttatggtccgccttcgtgctggctgctgttgtggcactggttatttgcctgattaccttctttgttgtctcctggattctggggcgtcagggtaaacaacagagcgaaaatgaagtcacaggtggtcgtcagctgacagacaatccgaaagacgttgcccggatgctgaaaaaagacggcaaggactccgatatccggattggagacctgccgattatccgggattccgaaatccagaacttctgtctgcacggcacggtcggggccggtaagtcggaagttatccgtcgtctggccaactacgcccgtcagcgcggtgatatggtggtgatttatgaccgttcgggggaatttgttaaaagttactatgatccctccatcgataaaatcctgaatccgctggatgcccgctgtgccgcctgggatttgtggaaggagtgcctgacacagccggattttgataataccgcaaatactctgatcccgatgggtacaaaagaggacccgttctggcagggttcaggacgtaccatttttgcggaagcggcgtatctgatgcgtaatgaccccaaccgcagctacagcaaactggtggacacactgctttccatcaaaattgaaaaactgcgtacctacctgcgtaattcaccggcggccaacctggtggaagagaaaattgagaaaacggcgatttccatccgtgctgtgctgaccaactacgtgaaagccatccgttacctgcaggggattgagcataacggtgagccttttaccatccgtgactggatgcgtggtgtccgggaagatcagaaaaacggctggctgtttatttcgtcgaatgccgacacccatgcctccctgaagccggtgatctccatgtggctgtccattgccattcgtggtctgctggcaatgggagaaaaccgtaaccgtcgtgtgtggtttttctgtgatgagttacccacgttacacaaactgccggacctggtggagatcctgccggaagcccgtaagttcggtggctgttatgtgtttggtatccagtcctatgcccagctggaagatatctacggtgagaaagcggctgcctcgctgtttgacgtcatgaacacccgtgcctttttccgttctcccagccataagattgcagagttcgctgccggtgaaattggtgagaaagagcacctgaaagccagcgagcagtattcctacggtgctgatccggtacgtgacggggtatcgaccggtaaggatatggagcgccagacgctggtcagttattccgacattcagtctctgccggatctgacctgttatgtcaccctgcccggaccgtatccggcagtaaaactctctctgaaatatcagacacgaccgaaggtcgctccggagtttattccgcgtgacatcaacccggaaatggagaaccgtctgagtgccgtacttgccgcaagggaagcagaaggtcgtcagatggccagcctcttcgaaccggatgtcccggaggttgtttccggagaagacgtgactcaggctgaacagccgcaacagccggtgtctcctgccatcaacgataagaagtcagattcaggtgtgaatgttccggcaggggggatcgagcaggagctgaaaatgaaaccggaagaagagatggaacagcaactgccacccgggatcagtgaatccggtgaagtggtggatatggccgcttatgaggcatggcaacaggaaaatcatccggacatccagcagcagatgcagcgtcgtgaagaggtgaacattaatgtgcaccgggagcgcggggaggatgttgagccgggagatgatttctgatgaacaggtcaactccagtcttcaattctcaggccgcccacacgttcaaattcccgggtgttattagtcacaataatcagtccccgactgcgggcatgacctgcgatcatttgatcaaatggcccgacagggcgtccctgaagggcaagttctgctcttatctggccggtgtgtgtggcagcagcagcgtcgtaatccagaacgtcaatgcgggaaacaaatccctcgatcacagcgagattacgttcaggcatctggcttttttctgcaccatatatcacctccatcagagtgaccgaactgatgcacattctcccctggttcaggttaaaacgttccctgacactggcgggtttgttctttatcgtaaaaatgcagatgttggtatcgagcataaacttcagcatcagaatgactccctttcctgcataccaggctgttccctgttatccataaaatcagcgctgacactgtttccgtcgaaccattcgtcccatgtctctccggcaggcgtaatgattcgggttcgtccgacagcaatcacttcaacgcgttttacgttttccggcaatgcaaccgcttttggcagtctgaccgcctggctgcggttgctgagaaatacggtggtttccattatttgcctccttatgtggatatgtcttgtgtatatccattgtgggattgatgccgggatatgtcaaagggatatacgtttatgatgagtattgcgcaggtcagatcggccggaagtgccgggaactattataccgacaaggataattactatgtgctgggcagcatgggagaacgctgggccggcaggggggctgaacagctggggctgcagggcagtgtcgataaggatgtttttacccgtcttctggagggcaggctgccggacggagcggatctaagccgcatgcaggatggcagtaacaggcatcgtcccggctacgatctgaccttctccgcccccaaaagtgtctccatgatggccatgttaggtggcgataagcgcctgattgatgcacataatcaggccgtggattttgctgtccgtcaggtggaggcgctggcctccacacgggtgatgacggacggacagtcagaaacggtgctgaccggtaatctggtgatggcactgtttaaccacgacaccagtcgcgatcaggaaccacagttacacacgcatgcggtggtggctaatgtcacgcagcataatggcgaatggaagacactgagcagtgacaaagtggggaaaacggggttcattgagaatgtgtacgctaatcagattgcctttggcaggctctaccgggaaaaactgaaagagcaggttgaggcgctgggctatgaaactgaagtggttggtaagcacggtatgtgggaaatgccgggtgtaccggtggaggccttttccggacgctcacagactatccgggaggccgtcggggaagacgcctcgctgaaatcccgggatgtggcggcgctggatacgcgtaaatccaaacagcatgtcgatccggagatcaaaatggccgagtggatgcagacgctgaaggaaaccgggttcgacatccgggcatatcgtgacgcggcggatcagcgtgcggatctccgcacgctgacgcccgggcctgcttcacaggacgggccggatgtgcagcaggcggtgacacaggcgattgccggattaagtgaacgaaaagtgcagttcacgtacacggacgtactggccagaacggtcggcatactgccgccggaaaatggtgtgattgaacgggcacgcgccggtatcgatgaggccatcagccgtgagcagcttatccccctcgaccgtgagaaggggctgttcacgtccgggattcatgtgctcgatgagctgtcagtccgggcactcagtcgtgacatcatgaaacagaaccgggtgaccgtacatccggagaaaagtgttccccggacggccggttacagcgatgccgtcagcgtgctggcacaggatcgcccgtcgctggccattgtgtccgggcagggcggtgcagccgggcagcgtgagcgggtggctgaactggtcatgatggcccgggagcaggggcgggaggtgcagattatcgctgctgaccgtcgctcgcagatgaacatgaagcaggatgaacggttgtccggtgagctgataaccggacgtcgtcagctgctggaaggcatggccttcacgccgggcagtactgttatcgttgaccagggcgaaaaactctccctgaaagagacgttaaccctgctggacggtgccgcacgtcataacgtacaggtcctgataaccgacagcgggcagcgaaccggtacaggcagtgcactgatggccatgaaggatgccggggtgaacacatatcgctggcaggggggagaacagcgaccggccaccatcatcagtgaaccggaccgtaatgtccgctatgcccggctggcaggagattttgcggccagcgtgaaagccggagaagagagcgtggcacaggtcagcggggtacgggaacaggccatactgacacaggccattcgcagtgagctgaaaacacagggcgtgctcggactcccggaggtgaccatgactgccctttcaccggtctggctggacagccggagccgttatctgcgggatatgtaccgtccggggatggtgatggagcagtggaacccggagacacgcagtcatgaccgctatgttatcgaccgggtgacggcgcagagtcacagcctgaccctgcgggatgcgcagggtgaaacgcaggtggtgcgtatttcctccctggacagcagctggtcgctgttccggccggaaaaaatgccggtggcagacggcgagcgactgagggtgacagggaaaattcccggactccgcgtctccggcggtgaccgcctgcaggtggcatccgtcagtgaagatgcgatgacggttgttgtgccgggacgggctgaaccggccaccctgcctgtgagcgattcaccgttcacggcactgaagctggagaacggctgggtggaaacgcccgggcattccgtcagcgacagtgcgacggtttttgcctccgtcacacagatggcaatggacaatgccaccctgaacggtctggcccgcagtggtcgtgatgtccggctgtattcctcactggatgaaacccgtactgcggaaaaacttgcccgccatccgtcctttacggtggtttctgagcagataaagacgcgggccggtgagacatcgctggaaacggctatcagtcatcagaagtccgcacttcacacgccggcacagcaggccattcatcttgcccttccggtggtggaaagtaaaaaactggccttcagcatggtggacctgctgacagaggcaaagtcgtttgctgcagaaggaaccggttttactgaactgggaggggaaatcaatgcgcagataaaacggggtgatttactgtatgtggatgtggcaaaaggctatggcacaggtctgctggtttcccgtgcgtcgtatgaggcagaaaagagcattcttcgccatattctcgaaggtaaggaggcggtcatgccgctgatggagagagtacctggcgaactcatggagaaactgacatcaggacagcgtgccgccacccgcatgatactggaaacgtccgaccgtttcacggtggtacagggctatgccggtgtgggtaagaccacacagttccgggcggtgatgtcagccgtgaacatgctgccggagagtgagcgtccccgagtcgtggggctgggtcccacacaccgtgcggtcggggagatgcgcagcgccggcgtggatgcgcagacactggcgtcctttctgcatgacacgcagctgcagcagcgcagcggagaaacgccggatttcagcaacacgctgttcctgctcgatgagagctcaatggtgggcaataccgacatggcacgggcatacgccctgattgcggccggtggcggtagggcggtggccagtggtgacacggaccagctgcaggccatcgcgcccggtcagcctttccgtctccagcagacgcgcagtgctgccgatgtggccatcatgaaggagattgtgcgtcagacgccggaactgcgggaggcggtatacagcctgattaaccgggatgtggaaagggcactgtccgggcttgagagtgtgaaaccgtctcaggtgccacgtcaggagggcgcatgggcaccggagcactccgtgacggagttcagtcacagccaggaagcgaaactggcagaagcgcagcagaaggcgatgctgaaaggcgaggcttttccggatgtccccatgacactgtatgaagccattgtccgcgactataccggcagaacaccggaagcacgggagcagacgctgattgtcacgcacctgaatgaggaccggcgcgtactgaacagcatgattcatgatgtacgggaaaaggccggtgagctggggaaagagcaggtcatggtgcctgtcctgaacacagcgaatatacgtgacggggagctgcgtcgtctctccacctgggagacacatcgggacgcacttgtcctggtggataatgtgtatcaccggattgccggtatcagtaaggatgacgggctgataaccctgcaggatgcggaaggtaacacgcggttgatttctccccgggaggcggtggctgaaggtgtcacactgtacaccccggacaccatcagggtggggaccggtgaccggatgcgcttcacgaagagtgaccgggagcgcggttatgtggccaacagcgtctggacggtgacagcagtttccggtgacagtgtcacgctgtcggacggacagcagacccgggagattcgccccggccaggagcaggcagagcaacatattgacctggcctatgccatcaccgctcacggtgcgcagggggcaagtgaaacctttgccattgcgcttgaaggaacggaaggtaaccggaaactgatggccggctttgagtcagcctacgtggccctgtcgcgtatgaagcagcatgtgcaggtgtacaccgataaccgtcagggctggacggatgccattaacaatgccgtacagaaaggaacggcccacgatgtatttgagccgaaaccggaccgggaggtcatgaatgcagagcggctgttcagtacggcgcgggaactgcgggacgtggcggcagggcgtgctgttctccgtcaggcggggctggccgggggagacagtccggcacggtttattgcaccggggcgcaaatatccgcagccgtatgtggcactgccggcgtttgaccgtaacggcaagtcagcaggtatctggctgaacccactgaccacggatgacggaaacgggctgcggggattcagtggtgaaggacgggtgaaaggcagcggggatgcgcagttcgtggccctgcagggcagccgtaacggagagagcctgctggctgataatatgcaggatggtgtccggattgcccgtgataatcctgacagcggtgtggtggtgagaatcgccggtgaaggtcgtccgtggaatcccggtgccatcaccggtggtcgcgtgtggggggatatcccggacaacagtgtccagccgggagccggaaatggcgaaccggtcacggcagaggtgctggcacagcggcaggctgaagaggccatccgtcgtgaaacggaacgccgcgcagatgaaattgtccgtaaaatggcagagaacaaacctgacctgccggatggcaaaacagagcaggctgtcagggagattgccgggcaggagcgtgaccgggctgccataactgaacgggaagccgcgctgccggagggtgtactgcgtgaacctcaacgggtgcgggaagctgtcagggaaattgcccgggaaaatctgctgcaggagcgacttcagcagatggagcgggatatggtccgcgacctgcagaaagagaaaaccctgggtggagactgatacaggaagacaaacgctgatgacaacggataacacgaacacgacacgtaacgattcactggttgcccggaccgatacctggttgcagtcgttgctggtctggtcacccggacagcgggatatcatcaaaacggtggcactggtgctgatggttctggaccatgcaaaccgtattctgcatctggaccagtcgtggatgtttctagccgggcgcggggcctttccgctgtttgccctggtgtgggggctgaatctgtcccgtcatgcgcatatccggcaactggccattaaccggctgtggggatgggcagttttttcccagttctggtattactttgccggctttccctggtatgaggggaatatcctgtttgcctttgcagtggcggcacaggtgctgacatggtgtgaaacgcgcagtgggtggcgtactgcagcggccattctcatgatggcactgtgggggcctttgtccggcaccagttacggcattgccgggctgctgatgctggctgtcagccaccggctgtaccgggcggaagacagaatggaacgtctggtgcttgtcgcttgcctgctggccgtgattccggcgcttaaccttgccaccagtgatgcggcggctgtagccggccttgtgatgacggtgctgaccgttggtctggtgtcgtgtgcagggaaattattatcccgtttctggcccggagactttttcccgacgttctatgcctgtcatctggctgtgctgggcgttctggcgctgtgacgggtgtggtatctttggccgcaagaggatgattcgggtgcttacccggaaggggagggcaccctgcttattgataatcaggaggccccttgcgctcgttcgccagccaggacagaaatgcctcgacttcgctgctgcccaaggttgccgggtgacgcacaccgtggaaacggatgaaggcacgaacccagtggacataagcctgttcggttcgtaagctgtaatgcaagtagcgtatgcgctcacgcaactggtccagaaccttgaccgaacgcagcggtggtaacggcgcagtggcggttttcatggcttgttatgactgtttttttggggtacagtctatgcctcgggcatccaagcagcaagcgcgttacgccgtgggtcgatgtttgatgttatggagcagcaacgatgttacgcagcagggcagtcgccctaaaacaaagttaaacatcatgagggaagcggtgatcgccgaagtatcgactcaactatcagaggtagttggcgtcatcgagcgccatctcgaaccgacgttgctggccgtacatttgtacggctccgcagtggatggcggcctgaagccacacagtgatattgatttgctggttacggtgaccgtaaggcttgatgaaacaacgcggcgagctttgatcaacgaccttttggaaacttcggcttcccctggagagagcgagattctccgcgctgtagaagtcaccattgttgtgcacgacgacatcattccgtggcgttatccagctaagcgcgaactgcaatttggagaatggcagcgcaatgacattcttgcaggtatcttcgagccagccacgatcgacattgatctggctatcttgctgacaaaagcaagagaacatagcgttgccttggtaggtccagcggcggaggaactctttgatccggttcctgaacaggatctatttgaggcgctaaatgaaaccttaacgctatggaactcgccgcccgactgggctggcgatgagcgaaatgtagtgcttacgttgtcccgcatttggtacagcgcagtaaccggcaaaatcgcgccgaaggatgtcgctgccgactgggcaatggagcgcctgccggcccagtatcagcccgtcatacttgaagctagacaggcttatcttggacaagaagaagatcgcttggcctcgcgcgcagatcagttggaagaatttgtccactacgtgaaaggcgagatcaccaaggtagtcggcaaataatgtctaacaattcgttcaagccgacgccgcttcgcggcgcggcttaactcaagagaggaagagtaaggatggaacgggatatattttctgcgatattaccgaaaccgtatcgatcctcaggtacatcttcaactgccgcatcaagccctttctggttccacagctgcctcagtatcttcatattacagatctccgtacaggcagcgcagcccggtcagggcctccgccagcgggccttcttgacaccgcgtggcgagctcccggaccagcgtctcaaaggcctccgccggcataaaaatccgcaggccgtctatcccgaagaagccctccggcgtgacgtttccgggcggggagaacatcactcgctccccctggtgaccgtgcgtcagggcttccggatgccgggcatacagcgtgaacaggcccagcagttcggataacgcttcccagccgtacggcaccacgaagtcctggccggtgatcagcaggtgcagacggggtgtggtgtaccaggcccccgggcgttctccggggtgctggccgtcaacgcggatctccaggcgcagcgtgccggcctcaatggtttccgtgacggcagaaataaccgggcgcagctcctgtgccagcgttcttgcctgttctgtgttccagtccaggccgcgcagcatcaacgggaaaacagctttcagccgcggcagggtgaagatttctgccagcaccgcgtccggcacctccgccaggccaaaacagtcgctctcgagcggacgcaggaggtgttcggcatacatctgatccaccacggggcgcagcgctgcccggaaggcttcaaactcttccgtccagtttttcccggccaggcggaaaatccccttcaggtagtgaccgtccacagggcgatcgtgctccacctgccaggccagcaggttgccagtgatgtccagcagcgtgtccagggccgggagtgtggccagcctattatgcccgcgcaggaaggcctccctgacgtgaaccaggacaaagcgcagttcgtcgcgggagagcgctgacgtgccgaaggtctggcccagaatgatatgccggtacagctgccggaccgtggcctccggatcggcaatgagctgaaaatacccgtcaccgggcgcgaccgttttcaggccgtcatcgaggaagcgttcggctagggcgttgaccgaagtattttcccgaccggcacgcgttttcagcgcctcgataagttttttgtgaaaacgcaggttaagctggcttagcatcatcgatcctttaatgtttgttttgttcttaatgctaacctagcattttattattagctattaatcagttttttagtttttgaaaattgtgatgcttctaaaattactaaaattgaggattttaatgctacaacaatgcctgcctcttcttatttctccggagatccgaaaaccccaagttacggatcttcctctccctccgcacagcgttacatcccgtcagcacagcatgtagtgcctcatacagttgcccatggcactatatgttgtgttgtatctctggactgtgatgcgccgcgcaggggcggaaaacagcgatatgatgattttctcagcgttgtacacttccggaaagtcgtttattcaaataaagtcggatccatacgaaacgggaatgcggtaattacgctttgtttttataagtcagattttaatttttattggttaacataacgaaaggtaaaatacataaggcttactaaaagccagataacagtatgcgtatttgcgcgctgatttttgcggtataagaatatatactgatatgtatacccgaagtatgtcaaaaagaggtgtgctatgaagcagcgtattacagtgacagttgacagcgacagctatcagttgctcaaggcatatgatgtcaatatctccggtctggtaagcacaaccatgcagaatgaagcccgtcgtctgcgtgccgaacgctggaaagcggaaaatcaggaagggatggctgaggtcgcccggtttattgaaatgaacggctcttttgctgacgagaacagggactggtgaaatgcagtttaaggtttacacctataaaagagagagccgttatcgtctgtttgtggatgtacagagtgatattattgacacgcccgggcgacggatggtgatccccctggccagtgcacgtctgctgtcagataaagtctcccgtgaactttacccggtggtgcatatcggggatgaaagctggcgcatgatgaccaccgatatggccagtgtgccggtctccgttatcggggaagaagtggctgatctcagccaccgcgaaaatgacatcaaaaacgccattaacctgatgttctggggaatataaatgtcaggctccgttatacacagccagtctgcagtcatggtaccggcagtgtattctgccgggcagcctgcatcgctgcctgttgccattgattatccggcagctctggcacttcgccagatgtcgatggtccatgatgaactgccaaaatatctgctggctccggaagtgagtgccctgctccattacgtcccggatctgcaccgcaagatgctgctggccacactgtggaacaccggagcacgcattaatgaagcactggcgctgacgcggggggatttttcgcttgcgcctccgtatccgtttgtgcagcttgcgaccctgaaacaacggaccgaaaaagctgccaggacggcggggagaatgcccgccggtcagcagactcaccggctggttccgctctctgactcctggtacgtcagccagctgcagacgatggtggcaacactgaaaatacccatggagcggcgtaaccgtcgcacaggaaggacagagaaagcgcggatctgggaagtgacggacagaacggtcaggacctggattggggaggcggttgccgccgctgctgctgacggtgtgacgttctctgttccggtcacaccacatacgttccgccattcctatgcgatgcacatgctgtatgccggtataccgctgaaagttctgcaaagcctgatgggacataagtccatcagttcaacggaagtctacacgaaggtttttgcgctggatgtggctgcccggcaccgggtgcagtttgcgatgccggagtctgatgcggttgcgatgctgaaacaattatcctgagaataaatgccttggcctttatatggaaatgtggaactgagtggatatgctgtttttgtctgttaaacagagaagctggctgttatccactgagaagcgaacgaaacagtcgggaaaatctcccattatcgtagagatccgcattattaatctcaggagcctgtgtagcgtttataggaagtagtgttctgtcatgatgcctgcaagcggtaacgaaaacgatttgaatatgccttcaggaacaatagaaatcttcgtgcggtgttacgttgaagtggagcggattatgtcagcaatggacagaacaacctaatgaacacagaaccatgatgtggtctgtccttttacagccagtagtgctcgccgcagtcgagcgacagggcgaagccctcgagtgagcgaggaagcaccagggaacagcacttatatattctgcttacacacgatgcctgaaaaaacttcccttggggttatccacttatccacggggatatttttataattattttttttatagtttttagatcttcttttttagagcgccttgtaggcctttatccatgctggttctagagaaggtgttgtgacaaattgccctttcagtgtgacaaatcaccctcaaatgacagtcctgtctgtgacaaattgcccttaaccctgtgacaaattgccctcagaagaagctgttttttcacaaagttatccctgcttattgactcttttttatttagtgtgacaatctaaaaacttgtcacacttcacatggatctgtcatggcggaaacagcggttatcaatcacaagaaacgtaaaaatagcccgcgaatcgtccagtcaaacgacctcactgaggcggcatatagtctctcccgggatcaaaaacgtatgctgtatctgttcgttgaccagatcagaaaatctgatggcaccctacaggaacatgacggtatctgcgagatccatgttgctaaatatgctgaaatattcggattgacctctgcggaagccagtaaggatatacggcaggcattgaagagtttcgcggggaaggaagtggttttttatcgccctgaagaggatgccggcgatgaaaaaggctatgaatcttttccttggtttatcaaacgtgcgcacagtccatccagagggctttacagtgtacatatcaacccatatctcattcccttctttatcgggttacagaaccggtttacgcagtttcggcttagtgaaacaaaagaaatcaccaatccgtatgccatgcgtttatacgaatccctgtgtcagtatcgtaagccggatggctcaggcatcgtctctctgaaaatcgactggatcatagagcgttaccagctgcctcaaagttaccagcgtatgcctgacttccgccgccgcttcctgcaggtctgtgttaatgagatcaacagcagaactccaatgcgcctctcatacattgagaaaaagaaaggccgccagacgactcatatcgtattttccttccgcgatatcacttccatgacgacaggatagtctgagggttatctgtcacagatttgagggtggttcgtcacatttgttctgacctactgagggtaatttgtcacagttttgctgtttccttcagcctgcatggattttctcatactttttgaactgtaatttttaaggaagccaaatttgagggcagtttgtcacagttgatttccttctctttcccttcgtcatgtgacctgatatcgggggttagttcgtcatcattgatgagggttgattatcacagtttattactctgaattggctatccgcgtgtgtacctctacctggagtttttcccacggtggatatttcttcttgcgctgagcgtaagagctatctgacagaacagttcttctttgcttcctcgccagttcgctcgctatgctcggttacacggctgcggcgagcgctagtgataataagtgactgaggtatgtgctcttcttatctccttttgtagtgttgctcttattttaaacaactttgcggttttttgatgactttgcgattttgttgttgctttgcagtaaattgcaagatttaataaaaaaacgcaaagcaatgattaaaggatgttcagaatgaaactcatggaaacacttaaccagtgcataaacgctggtcatgaaatgacgaaggctatcgccattgcacagtttaatgatgacagcccggaagcgaggaaaataacccggcgctggagaataggtgaagcagcggatttagttggggtttcttctcaggctatcagagatgccgagaaagcagggcgactaccgcacccggatatggaaattcgaggacgggttgagcaacgtgttggttatacaattgaacaaattaatcatatgcgtgatgtgtttggtacgcgattgcgacgtgctgaagacgtatttccaccggtgatcggggttgctgcccataaaggtggcgtttacaaaacctcagtttctgttcatcttgctcaggatctggctctgaaggggctacgtgttttgctcgtggaaggtaacgacccccagggaacagcctcaatgtatcacggatgggtaccagatcttcatattcatgcagaagacactctcctgcctttctatcttggggaaaaggacgatgtcacttatgcaataaagcccacttgctggccggggcttgacattattccttcctgtctggctctgcaccgtattgaaactgagttaatgggcaaatttgatgaaggtaaactgcccaccgatccacacctgatgctccgactggccattgaaactgttgctcatgactatgatgtcatagttattgacagcgcgcctaacctgggtatcggcacgattaatgtcgtatgtgctgctgatgtgctgattgttcccacgcctgctgagttgtttgactacacctccgcactgcagtttttcgatatgcttcgtgatctgctcaagaacgttgatcttaaagggttcgagcctgatgtacgtattttgcttaccaaatacagcaatagtaatggctctcagtccccgtggatggaggagcaaattcgggatgcctggggaagcatggttctaaaaaatgttgtacgtgaaacggatgaagttggtaaaggtcagatccggatgagaactgtttttgaacaggccattgatcaacgctcttcaactggtgcctggagaaatgctctttctatttgggaacctgtctgcaatgaaattttcgatcgtctgattaaaccacgctgggagattagataatgaagcgtgcgcctgttattccaaaacatacgctcaatactcaaccggttgaagatacttcgttatcgacaccagctgccccgatggtggattcgttaattgcgcgcgtaggagtaatggctcgcggtaatgccattactttgcctgtatgtggtcgggatgtgaagtttactcttgaagtgctccggggtgatagtgttgagaagacctctcgggtatggtcaggtaatgaacgtgaccaggagctgcttactgaggacgcactggatgatctcatcccttcttttctactgactggtcaacagacaccggcgttcggtcgaagagtatctggtgtcatagaaattgccgatgggagtcgccgtcgtaaagctgctgcacttaccgaaagtgattatcgtgttctggttggcgagctggatgatgagcagatggctgcattatccagattgggtaacgattatcgcccaacaagtgcttatgaacgtggtcagcgttatgcaagccgattgcagaatgaatttgctggaaatatttctgcgctggctgatgcggaaaatatttcacgtaagattattacccgctgtatcaacaccgccaaattgcctaaatcagttgttgctcttttttctcaccccggtgaactatctgcccggtcaggtgatgcacttcaaaaagcctttacagataaagaggaattacttaagcagcaggcatctaaccttcatgagcagaaaaaagctggggtgatatttgaagctgaagaagttatcactcttttaacttctgtgcttaaaacgtcatctgcatcaagaactagtttaagctcacgacatcagtttgctcctggagcgacagtattgtataagggcgataaaatggtgcttaacctggacaggtctcgtgttccaactgagtgtatagagaaaattgaggccattcttaaggaacttgaaaagccagcaccctgatgcgaccacgttttagtctacgtttatctgtctttacttaatgtcctttgttacaggccagaaagcataactggcctgaatattctctctgggcccactgttccacttgtatcgtcggtctgataatcagactgggaccacggtcccactcgtatcgtcggtctgattattagtctgggaccacggtcccactcgtatcgtcggtctgattattagtctgggaccacggtcccactcgtatcgtcggtctgataatcagactgggaccacggtcccactcgtatcgtcggtctgattattagtctgggaccatggtcccactcgtatcgtcggtctgattattagtctgggaccacggtcccactcgtatcgtcggtctgattattagtctgggaccacggtcccactcgtatcgtcggtctgattattagtctgggaccacggtcccactcgtatcgtcggtctgattattagtctgggaccacgatcccactcgtgttgtcggtctgattatcggtctgggaccacggtcccacttgtattgtcgatcagactatcagcgtgagactacgattccatcaatgcctgtcaagggcaagtattgacatgtcgtcgtaacctgtagaacggagtaacctcggtgtgcggttgtatgcctgctgtggattgctgctgtgtcctgcttatccacaacattttgcgcacggttatgtggacaaaatacctggttacccaggccgtgccggcacgttaaccgggctgcatccgatgcaagtgtgtcgctgtcgacggcctcctcacccggtcacgtttcgtcgtttctcctccacgcgctgcggcttcggggccgcacctgcattcgtatgcggtcgcccggttacaggtgcggcacggcctgatggaggccgcatgtgagaggagaattcccatgccaaactggtgctcgaatcgtatgtatttttctggtgaaccggcacagatcgctgagattaaacgactggccagcggtgcagtcacaccgctttatcgccgcgccacaaatgaaggtattcagctgtttctggccggaagtgccggacttctgcagaccactgaagatgtgcggtttgaaccatgccccggactgacggctgctgggcgtggcgttgtatcgccggagaatatcgcgttcacccgctggctgacacacctgcaggacggtgtacttctggatgagcaaaactgcctgatgctgcatgaactctggctgcagagcggtactggccggcgtcgctgggaagaattaccggatgatgccagggaaagcattaccgctcttttcaccccaaaaagaggtgactggtgcgacatctggagtaacgaggatgtatcggtgtggtggaaccgtctgtgtgacaacgtcctgccggaaaaaccatgccgtttgacctgctgacggttctgttcactcgcctggatgttgaagtgaatggctttaacggtggtgttctgaacggtgttccttctgcatatcactggtatacggaacagtatggcgtgaaggggccttgtgggtatgaggtgaatatcagcagtcagggagacaacttcattcaggttgatttcgacacgccgtggtgtcagccggaaagcgacgttattgcagtattaagccgccgtttcagttgcacgctggagcactggtacgccgagcagggctgcaatttctgtggctggcagcgatatgagcgtggagagcttgttgatgtgctgtggggggaactggaatggtcttccccgacagatgatgatgagctgccggaagtcaccgcgccggagtggatagtcgacaaggtggcgcattacggtggatgaagtatgacggagactggcgggcaaccgcccgtttcttttccggtaaaggatgtcgccgggctcctctttttactgcgccggctgacgcggcgcggcaggaacgctgcctgtggtcagtgtcccgcgtccggctgggcacgggacgggcgcttttaccgctcccggctggcatcggtgacagtgtacgccagcccgtcgcccttttctgatgaacgcccttcaagccgctttcgcggcatattctcgccgtcaaaaagacgacggctgcgatattccacggtcggcctgacccgttaccggacgcggtgaacagcccacaggccgcggggaacgggcgccacaggggcgccctcccggtgccctctgtaagagaaggagtgctgttatgtcccgttttatccagggtgactgcgtgcgtgttatggccacgtttccgggcaatgctgtcgatttcatcctcaccgacccgccatatctcgtcggtttccgtgaccgtcaggggcgtaccatcgccggcgataaaaccgatgaatggctgcaaccggcctgtaatgaaatgtaccgcgtgctgaaaaaagatgcgctgatggtgagcttctatggctggaaccgcgtcgatcgctttatggccgcctggaaaaatgcgggattcagcgtggttggccacctggtgtttaccaaaacctacacatcgaaggccgcatatgtgggctatcgccacgaatgcgcttacatcctggcaaaagggcgtccggcgctgcctcagaagccattgcccgacgtgctgggctggaaatattcaggcaatcgtcatcacccgacggaaaagcctgttaccagcctgcaaccactgattgagagcttcacacacccgaacgcgattgtgctggacccgtttgcaggcagcggctcaacctgtgtggccgcccttcagtccggacgccggtatatcggtatcgagctgcttgaacagtatcaccgtgccggacagcaacgtctggctgccgtacagcgggccatgcagcagggggctgcaaatgatgactggtttatgccggaggctgcgtaaatgaactatgccggacataaaaaacttcgcgccgacgtggcggaggtggccaacaccatgtgtgaccttcgggccaggctgaacgatatggagcatcgctgtcgctttgattccgatgtgcttgttgaacgcctggcacgccagacgctgtatcgcgccaatcgcctgttcatggaggcgtataccgaaattctggaactggatgcgtgctttaaagattgagaaggagacgagaatgtacggaacatgcgaaacgctatgccgggagctggcagcaaagtatccgggatatacaccgctgatgctggttatctggtccccggaagagattcaggccctcgctgacggaatggatatttccctgtccgatcctgaaatcaggaccgtcctggcgcgcctggaggacatcccggaagaccagcgaattgagtccggtatttcttctgccgcggcgatggagattatcagcaacgtgagcgaaaaccgccaggtgaccgtcccggctgaactgctggcgtccctgattcagaccgccgaacaggcactgtggaaacgtgaatgggccgcccgtgattacggcctcgccgtcccggaatgcgttacccgccgtcaggcggtggttaatcaggcccgcatcctgctgaaaaacaacacacacgaaaacggctgatgttatcgccgcctgcgggcggcgatacagggagaacgattaatcatgaacgaaaacacaacgctgaacgcactgatttgtcgtcacgcccgtaacctgctgctggcgcagggctggccggaagagacggatgtcgaccagcgtaacccgaagtatccgggctggatcagcatttatgttctgctggatgcgccccggctggcgacgttactcgttaaccgccacggcggcgtactgccgccgcacctggcctccgccattcagaaactgaccggaaccggagcggaacttgttctgtccggcagtcagtggcagtcgctgccggtgcttccggcagacggaacgcaggtgtcttttccgtatgccggtgaatggctgaccgaagacgaaatcagggctgtacttgcggcggtgcgcgatgcggtacgcagtgtcagttgccgggtggcagaagatatgcggcgtatccgggcggcgctgaccaccaccggtcagacgttactgacccgccagactcgccgctttcgcctggtcgtgaaggaaagcgatcacccctgctggctcgatgaggacgacgaaaacctgcccgtggtgctcgatgccatcctgaaccggggcgcacgtttttcggcggtggaaatgtatctggtcagcgattgtattgaacatatcctgtctagtgggctggcctgcgatgtgctgcgtataccggatgaaccgccccgccagtggtttgaccgtggtgttctgcgggaagttgtccgggaagcccgggccgaaatccgcagcatggcggatgccctggcaaaaatcaggggctgatgatggcggggaaaatccccgctttttttctgccggtccccggacagagcacaaaggaagtcgccgccggctccgctttacccggccatgcaggcatggccttgtgggttttcagttatgtggccgccgtgtcgtgtgcgggcggtgccgtgcctccatcttagccgggctggcggggatgcaagggtacgcttcgccgctgcggtcacccggtccctccttcccgtctgccgtgattttccggtcgttcacccgctcaggtttcgcggtctcaccctccaactcccgtcagccgtgtgcgtcaggctgcggcttcccttgcgccctgtgcatccccgccttatcgcccggcttttatggaggcacggcaccgcccggtgtcgcggaatatgtgaataacggaggaaaacatcatgcaatatgcgaaacctgtcactctgaacgttgaagagtgcgaccgtctctcctttctgccttacctgtttggcaacgattttctgtatgccgaggcgtatgtgtacgcgctggcgcaaaaaatgatgccggaatatcagggaggcttctggcacttcatccgcctgccggacggtggcggttacatgatgccggatggcgaccgttttcatctggtcaacggtgaaaactggtttgaccgcacggtcagcgccgatgccgcaggcatcattctgacttcccttgtgattaaccgccagttgtggctgtaccacgacagcggggatgtaggactgacccagctttaccggatgcgcgatgcgcagttgtggcgtcacatcgaatttcaccccgaatgcaacgcgatttacgcggcactggactgattaacggacggggcggcaatgccgcccctgtaaaggagacgagaacatgtactgtactgttaaagaaatcatccgcgatgtactggatacagacgtgccggacagtgaatgcgtttttgccgtggtgctgacccgtggggatgtgcgccacatagcccaggactggaacctgtcagacgatgagctggaaaccgtcatgcagcggctggacgatgcctttgaatatggtgcggatgtcagcattgttcacgacgttgttcgtgagctgatggaagaaaagcgtgccagccgtcaggtgacagttccggcggtgatgctggaaaaagtgatggcgctggcaggcagtgaaatgaagcgcctgtatgccgtcgggagtgagaacgggggcgacggtgatgcgttcgtcagggaggaacgcgaagcaatggacgttgtgttacaggcgctggacggggagcacatgtcatgaatatcagcacagaaacccgcgaaattctgcgcaattacaaagccgtgattaatgcgcgacgtcgtgaaatggggcagaaaccgctcaccaccgcgcagattgttgatgaaatctgcgattttgtggcgaatcagcaggctgttttcctgggcggtcactacatcttacagggcagcagaaacaggtgatacagggcaggcggtggaggccgcctgtcagcccgcgcgaaaacccctggcaggctgacgcctgccggaagggaagcgggccacgctgacgcgtcgcccgttacccttcctgtttgtgatgtgtccggaatgtttttttctgatgttatttttctgtggttaccgtgcctgttactgttcttcttctttttcctcttcctcttcttcctcttcttcctcttctttccgttcctctcctgcttatggcttttccgggcgtccccctggtggggcgggctgtcgtgaacggagccagcgaagctgtctccgccctggcgggcttccatccctgacgcgaaaccctggcttgcagcgaccgttccggtcgcgccgcctctgtcgcgccgtggcctgcgctcccggcatcccggcaaaaggccgccgggatgtaaggggcaacgccgtttcgcaaaccgcgcttcacgtcgttgcggcgggtccctgctcattgcctgccgggtgccacacacccgtatgagtccctgtcgccggggctgatacagccacaacctgccgcactgactgtccagggtaaatgaacagcccacaaaattttttacccaaaacccggtaaaaaattttgcgttctgcccaggacaggtgtgtcaggccgtggcagtgatgccccttgcggcgaaggttctcaaaaaggtgatggtgaataccggagggaacaaaaggcaggtccccgcaaaacgtcaaaaccgcggctcccgaaactcaaaagatgatgggggctgaaaacatcaacagaaggagacacatcatggcagttcgtggcattaacaaggtcatcctcgtaggacgcctgggaaaggatccggaagtccgttacatccccaacgggggcgcagtggcaaacctgcaggtggccacgtcagaaagctggcgtgacaaacagacgggggagatgcgggagcagacagaatggcatcgcgtggtgctgttcggcaagctcgcggaagtggcaggtgaatgtctgcgcaagggcgcgcaggtctacatcgaaggtcagcttcgcacccgtagctgggaggataacggtatcacccgttacgtcaccgaaattcttgttaagaccacgggcaccatgcagatgctggtacgtgccgcaggtgctcagactcagccggaagaggggcaacagttcagcggtcagcctcagccggaaccacaggcggaggccggtacgaaaaaaggtggcgcaaaaacgaaaggccgtggacgtaaggccgcgcagccggagcctcagccgcaaccgccggagggtgacgattacgggttttcagacgatatcccgttctgaa

SEQ ID NO: 5618 - DNA, 30000 bp, Artificial Sequence
  Description of Artificial Sequence: Synthetic polynucleotide
tgacagcgtcagggataaagccagcgacaaggataaggagcgggtgaccaaaaacatcaacatcatgtggaatgcgctttccaaaaacagaatgtttgacggcaacaaagagctgaaagagtttgtgatgacgctgaccggctcactggtgtttggtcccaacggcgaaatcacaccgctgtcagccagaaccactgaccgttcaattatccgggccatgatggaaggcggcacagcaaaaatttctcactgcaacgattctgataaatgcctgaaagtggtggcagacacaccggtgaccatcagccgggataatgcactgaagtctcagattactaaacttctggccagcattcagaacaaggctgtcagtgacacgcctctggatgacaaggaaaaaggctttatttccagtaccaccatccccgtcttcaaatacctggttgacccgcagatgctcggtgtttccaacagtatgatttaccagctgacggactatatcggttacgacatcctgctgcagtacattcaggagctgatacagcaggcacgggcgatggtggccacgggaaattatgacgaagcggttatcgggcatattaacgacaacatgaatgatgccacccggcagattgcggcgtttcagtcacaggtgcaggtacagcaggatgcgctgctggttgtcgatcgtcagatgagctacatgcgtcagcagctttccgcccgcatgctcagtcgttaccagaacaactatcacttcggagggagcacgctgtgaatgaagtttatgtgattgccggtggtgagtggttgcggaataacctgaacgccattgccgcctttatgggaacctggacgtgggattccattgaaaaaattgcgctcacattgtctgttctcgcggtggccgtaatgtgggtacagcggcacaacgtgatggatttgctgggctgggtggccgtgtttgtgcttatcagcctgctggttaatgtccgcacatcggtgcagattattgataacagtgacctggtcaaagttcaccgggtggataatgtgccggtcggtctggcgatgccactttcactgacgacccgtatcgggcatgcaatggtggccagttacgagatgatcttcacgcaaccggacagcgtcacctacagcaaaacggggatgctgttcggggcgaatctgattgtgaaaagcaccgatttcctgtcccggaatccggaaatcatcaatctgttccaggactacgtccagaactgcgtgctgggtgatatttacctgaatcataaatacacgctggaagacctgatggcctccgctgacccctacacgctgattttttcccgccccagcccgctacggggcgtttatgacaacaataataatttcataacttgtaaggatgcgtcggtcacgctgaaagacaggctgaatctcgatacaaagacgggaggcaagacctggcattattatgtgcagcagatatttggcggcagaccggacccggacctgttattcagacaactggtcagtgacagttacagttatttctacggctccagtcagtctgccagccagattatgcgccagaacgtcaccatgaatgccctgaaagagggtatcaccagtaatgcagcccgtaacggtgacaccgccagcctggtaagtctggccaccacgtcatcgatggagaaacaacgtctggcacatgtctccattggtcatgtaactatgcgaaacctgccgatggtccagactatcctgacggggattgccattggtatattcccgctcctgatactggcggctgtctttaacaagctgacattgtctgtattaaaggggtatgtgtttgccctgatgtggctgcagacctggccgttgttgtatgccattctgaacagtgccatgacattctatgcgaaacagaatggtgcgccggtcgtgttgtctgaactctctcagatacagctgaaatactctaacctggcctccactgccgggtatctttcagccatgatccccccgttgtcatggatgatggtaaaaggccttggcgcaggtttttccagcgtgtacagccacttcgcctcttcatctatcagtccaacggccagtgcagcaggcagtgtggttgacggtaattactcctacggcaacatgcagacggaaaacgtgaacggcttcagctggagcaccaacagcaccacgtcgtttggtcagatgatgtaccagaccggcagtggcgcaaccgccacacagacccgtgacggtaatatggtgatggatgcaagcggagcgatgtcccggttaccggtcggtatcaatgcaacgcgtcagattgcagcggcacaacaggaaatggcccgggaggcgtcgaacagagccgaaagtgccctgcatggtttcagcagcagtattgccagtgcctggaacacactcagtcagtttggctctaaccgggggagcagtgactctgtcactggtggtgctgacagcacgatgagtgctcaggactccatgatggccagccgtatgcgcagtgcagtggaaagctatgcgaaggcgcataatatcagtaatgagcaggcgacgagagaactggcctcgagaagtacaaatgcgtcgcttggcctttacggtgatgcttatgctaaagggcatttaggcataagtgtattgggtaacggtggaggggttggtctccaggccggagctaaggcaagcattgatggcagtgatcttgactcacatgaagccagtagtggttcacgggccagccatgatgctcgtcatgatatcgatgccagagctacacaagactttaaagaagccagcgattactttaccagccgcaaagtcagtgaatccggcagccatactgacaataatgctgattcccgtgtggatcagttgtctgcagccctgaattcagcgaaacagagttacgaccagtacacgacgaatatgacccgcagccatgaatatgctgaaatggcatcccgtactgagagtatgagtgggcagatgagtgaagatctgtcgcaacagtttgcacagtatgtgatgaaaaacgcaccgcaggatgttgaagctattctgacaaataccagttcgccggagattgcagaacgccgtcgggctatggcgtggtcttttgtgcaggaacaggtacagcctggtgttgataacacctggcgtgaatcccgtagagatataggtaaaggaatggagagcgtaccttcgggtggtggcagccaggatattattgctgatcatcagggacatcaggccattattgagcaaagaacgcaggacagtaatatccgtaatgatgtaaaacatcaggttgataatatggtcacagaatatcgaggtaatatcggagatactcagaacagcatccgaggcgaggaaaatattgtaaaagggcagtattctgaactacaaaatcatcataaaacagaagcattaactcagaataataaatataatgaagaaaagctggctcaggaaagaatacctggtgctgatagtccgaaagagcttttagagaaagcaaagagttaccagcataaagaataatcataacatgttgggtagggtatggagagaccatgattacacaacaaattatcagtagtgagttggaagttttaaagaaacatattgactcaggagatattagaattccgtcactatggcagggattaaaacccgggcttatcatcatggggtggatgattttttgtcccttgctaatgtcatttctaataacacaaaagacaagtgaaacactcactgctgtgttagccggaggatggcttggacttattattctgtttattgtggcaaggattagaatgttatatttctctctgccggaagaattcctaaagacatcatccgtaatgagggttatatcatcaaaacttaaagtgtatttcattgtgtatatgggagttatatttttatggtcttttttaggtggagggattatatacggttttggcgcaattttagtgacggttattatggcgttcttgattcaattagatatcggtagatatcaatttgttggtgttattgatgcaatcaatagttacgtcaaaaacaagaagttatcaagagtaaaataaaagatattagagagtaaatatatgatgaaaacaaaaaaactaatgatggttgcactggtcagttccactctggccctttcagggtgtggtgcgatgagcacagcaatcaagaagcgtaaccttgaggtgaagactcagatgagtgagaccatctggcttgaacccgccagcgaacgcacggtatttctgcagatcaaaaacacgtctgataaagacatgagtgggctgcagggcaaaattgctgatgctgtgaaagcaaaagggtatcaggtggtgacttctccggataaagcctactactggattcaggcgaatgtgctgaaggccgataagatggatctgcgggagtctcagggatggctgaaccgtggttatgaaggcgcagcagttggtgcagcgttaggtgccggtatcaccggatataattccaattctgccggtgccacactcggtgtgggccttgctgccggtctggtgggtatggctgcagatgcgatggtggaagatgtgaactataccatgatcacggatgtgcagattgcagagcgtactaaggcaacggtgacaacggataatgttgccgccctgcgtcagggcacatcaggtgcgaaaattcagaccagtacagaaacaggtaaccagcataaataccagacccgtgtggtctcaaatgcgaacaaggttaacctgaaatttgaagaggcgaagcctgttctcgaagaccagctggccaaatcaatcgcaaatattctctgattatcttccggaggctggtctgaccggcctcctgactgacgcctcgctttgctcgttgtccaaccccggaaagaaataaaataaattttatttctccccggcgtttccgaaataaatatgaaaacactgagcggttgtgcaaattctttgtgcgaccgtgaagtgttgccggcgaagccggaatttaacggttattaatcttttcatcattaataatcagtccgactgactttttttcttcggaatatcatcatgagttttaacgcaaaggatatgacccagggcggtcagattgcgtccatgcgtatccgcatgttcagccagatcgccaatatcatgctttactgcctgtttatttttttctggatactcgttggtctggttttatggataaaaataagctggcagacgtttgtgaacggctgtatttactggtggtgtaccacgctggaaggcatgcgggatttaatcaaatcccagccggtctatgagatccagtattacggtaaaaccttccgcatgaacgctgctcaggtactgcatgacaaatatatgatctggtgcagtgagcagttatggtccgccttcgtgctggctgctgttgtggcactggttatttgcctgattaccttctttgttgtctcctggattctggggcgtcagggtaaacaacagagcgaaaatgaagtcacaggtggtcgtcagctgacagacaatccgaaagacgttgcccggatgctgaaaaaagacggcaaggactccgatatccggattggagacctgccgattatccgggattccgaaatccagaacttctgtctgcacggcacggtcggggccggtaagtcggaagttatccgtcgtctggccaactacgcccgtcagcgcggtgatatggtggtgatttatgaccgttcgggggaatttgttaaaagttactatgatccctccatcgataaaatcctgaatccgctggatgcccgctgtgccgcctgggatttgtggaaggagtgcctgacacagccggattttgataataccgcaaatactctgatcccgatgggtacaaaagaggacccgttctggcagggttcaggacgtaccatttttgcggaagcggcgtatctgatgcgtaatgaccccaaccgcagctacagcaaactggtggacacactgctttccatcaaaattgaaaaactgcgtacctacctgcgtaattcaccggcggccaacctggtggaagagaaaattgagaaaacggcgatttccatccgtgctgtgctgaccaactacgtgaaagccatccgttacctgcaggggattgagcataacggtgagccttttaccatccgtgactggatgcgtggtgtccgggaagatcagaaaaacggctggctgtttatttcgtcgaatgccgacacccatgcctccctgaagccggtgatctccatgtggctgtccattgccattcgtggtctgctggcaatgggagaaaaccgtaaccgtcgtgtgtggtttttctgtgatgagttacccacgttacacaaactgccggacctggtggagatcctgccggaagcccgtaagttcggtggctgttatgtgtttggtatccagtcctatgcccagctggaagatatctacggtgagaaagcggctgcctcgctgtttgacgtcatgaacacccgtgcctttttccgttctcccagccataagattgcagagttcgctgccggtgaaattggtgagaaagagcacctgaaagccagcgagcagtattcctacggtgctgatccggtacgtgacggggtatcgaccggtaaggatatggagcgccagacgctggtcagttattccgacattcagtctctgccggatctgacctgttatgtcaccctgcccggaccgtatccggcagtaaaactctctctgaaatatcagacacgaccgaaggtcgctccggagtttattccgcgtgacatcaacccggaaatggagaaccgtctgagtgccgtacttgccgcaagggaagcagaaggtcgtcagatggccagcctcttcgaaccggatgtcccggaggttgtttccggagaagacgtgactcaggctgaacagccgcaacagccggtgtctcctgccatcaacgataagaagtcagattcaggtgtgaatgttccggcaggggggatcgagcaggagctgaaaatgaaaccggaagaagagatggaacagcaactgccacccgggatcagtgaatccggtgaagtggtggatatggccgcttatgaggcatggcaacaggaaaatcatccggacatccagcagcagatgcagcgtcgtgaagaggtgaacattaatgtgcaccgggagcgcggggaggatgttgagccgggagatgatttctgatgaacaggtcaactccagtcttcaattctcaggccgcccacacgttcaaattcccgggtgttattagtcacaataatcagtccccgactgcgggcatgacctgcgatcatttgatcaaatggcccgacagggcgtccctgaagggcaagttctgctcttatctggccggtgtgtgtggcagcagcagcgtcgtaatccagaacgtcaatgcgggaaacaaatccctcgatcacagcgagattacgttcaggcatctggcttttttctgcaccatatatcacctccatcagagtgaccgaactgatgcacattctcccctggttcaggttaaaacgttccctgacactggcgggtttgttctttatcgtaaaaatgcagatgttggtatcgagcataaacttcagcatcagaatgactccctttcctgcataccaggctgttccctgttatccataaaatcagcgctgacactgtttccgtcgaaccattcgtcccatgtctctccggcaggcgtaatgattcgggttcgtccgacagcaatcacttcaacgcgttttacgttttccggcaatgcaaccgcttttggcagtctgaccgcctggctgcggttgctgagaaatacggtggtttccattatttgcctccttatgtggatatgtcttgtgtatatccattgtgggattgatgccgggatatgtcaaagggatatacgtttatgatgagtattgcgcaggtcagatcggccggaagtgccgggaactattataccgacaaggataattactatgtgctgggcagcatgggagaacgctgggccggcaggggggctgaacagctggggctgcagggcagtgtcgataaggatgtttttacccgtcttctggagggcaggctgccggacggagcggatctaagccgcatgcaggatggcagtaacaggcatcgtcccggctacgatctgaccttctccgcccccaaaagtgtctccatgatggccatgttaggtggcgataagcgcctgattgatgcacataatcaggccgtggattttgctgtccgtcaggtggaggcgctggcctccacacgggtgatgacggacggacagtcagaaacggtgctgaccggtaatctggtgatggcactgtttaaccacgacaccagtcgcgatcaggaaccacagttacacacgcatgcggtggtggctaatgtcacgcagcataatggcgaatggaagacactgagcagtgacaaagtggggaaaacggggttcattgagaatgtgtacgctaatcagattgcctttggcaggctctaccgggaaaaactgaaagagcaggttgaggcgctgggctatgaaactgaagtggttggtaagcacggtatgtgggaaatgccgggtgtaccggtggaggccttttccggacgctcacagactatccgggaggccgtcggggaagacgcctcgctgaaatcccgggatgtggcggcgctggatacgcgtaaatccaaacagcatgtcgatccggagatcaaaatggccgagtggatgcagacgctgaaggaaaccgggttcgacatccgggcatatcgtgacgcggcggatcagcgtgcggatctccgcacgctgacgcccgggcctgcttcacaggacgggccggatgtgcagcaggcggtgacacaggcgattgccggattaagtgaacgaaaagtgcagttcacgtacacggacgtactggccagaacggtcggcatactgccgccggaaaatggtgtgattgaacgggcacgcgccggtatcgatgaggccatcagccgtgagcagcttatccccctcgaccgtgagaaggggctgttcacgtccgggattcatgtgctcgatgagctgtcagtccgggcactcagtcgtgacatcatgaaacagaaccgggtgaccgtacatccggagaaaagtgttccccggacggccggttacagcgatgccgtcagcgtgctggcacaggatcgcccgtcgctggccattgtgtccgggcagggcggtgcagccgggcagcgtgagcgggtggctgaactggtcatgatggcccgggagcaggggcgggaggtgcagattatcgctgctgaccgtcgctcgcagatgaacatgaagcaggatgaacggttgtccggtgagctgataaccggacgtcgtcagctgctggaaggcatggccttcacgccgggcagtactgttatcgttgaccagggcgaaaaactctccctgaaagagacgttaaccctgctggacggtgccgcacgtcataacgtacaggtcctgataaccgacagcgggcagcgaaccggtacaggcagtgcactgatggccatgaaggatgccggggtgaacacatatcgctggcaggggggagaacagcgaccggccaccatcatcagtgaaccggaccgtaatgtccgctatgcccggctggcaggagattttgcggccagcgtgaaagccggagaagagagcgtggcacaggtcagcggggtacgggaacaggccatactgacacaggccattcgcagtgagctgaaaacacagggcgtgctcggactcccggaggtgaccatgactgccctttcaccggtctggctggacagccggagccgttatctgcgggatatgtaccgtccggggatggtgatggagcagtggaacccggagacacgcagtcatgaccgctatgttatcgaccgggtgacggcgcagagtcacagcctgaccctgcgggatgcgcagggtgaaacgcaggtggtgcgtatttcctccctggacagcagctggtcgctgttccggccggaaaaaatgccggtggcagacggcgagcgactgagggtgacagggaaaattcccggactccgcgtctccggcggtgaccgcctgcaggtggcatccgtcagtgaagatgcgatgacggttgttgtgccgggacgggctgaaccggccaccctgcctgtgagcgattcaccgttcacggcactgaagctggagaacggctgggtggaaacgcccgggcattccgtcagcgacagtgcgacggtttttgcctccgtcacacagatggcaatggacaatgccaccctgaacggtctggcccgcagtggtcgtgatgtccggctgtattcctcactggatgaaacccgtactgcggaaaaacttgcccgccatccgtcctttacggtggtttctgagcagataaagacgcgggccggtgagacatcgctggaaacggctatcagtcatcagaagtccgcacttcacacgccggcacagcaggccattcatcttgcccttccggtggtggaaagtaaaaaactggccttcagcatggtggacctgctgacagaggcaaagtcgtttgctgcagaaggaaccggttttactgaactgggaggggaaatcaatgcgcagataaaacggggtgatttactgtatgtggatgtggcaaaaggctatggcacaggtctgctggtttcccgtgcgtcgtatgaggcagaaaagagcattcttcgccatattctcgaaggtaaggaggcggtcatgccgctgatggagagagtacctggcgaactcatggagaaactgacatcaggacagcgtgccgccacccgcatgatactggaaacgtccgaccgtttcacggtggtacagggctatgccggtgtgggtaagaccacacagttccgggcggtgatgtcagccgtgaacatgctgccggagagtgagcgtccccgagtcgtggggctgggtcccacacaccgtgcggtcggggagatgcgcagcgccggcgtggatgcgcagacactggcgtcctttctgcatgacacgcagctgcagcagcgcagcggagaaacgccggatttcagcaacacgctgttcctgctcgatgagagctcaatggtgggcaataccgacatggcacgggcatacgccctgattgcggccggtggcggtagggcggtggccagtggtgacacggaccagctgcaggccatcgcgcccggtcagcctttccgtctccagcagacgcgcagtgctgccgatgtggccatcatgaaggagattgtgcgtcagacgccggaactgcgggaggcggtatacagcctgattaaccgggatgtggaaagggcactgtccgggcttgagagtgtgaaaccgtctcaggtgccacgtcaggagggcgcatgggcaccggagcactccgtgacggagttcagtcacagccaggaagcgaaactggcagaagcgcagcagaaggcgatgctgaaaggcgaggcttttccggatgtccccatgacactgtatgaagccattgtccgcgactataccggcagaacaccggaagcacgggagcagacgctgattgtcacgcacctgaatgaggaccggcgcgtactgaacagcatgattcatgatgtacgggaaaaggccggtgagctggggaaagagcaggtcatggtgcctgtcctgaacacagcgaatatacgtgacggggagctgcgtcgtctctccacctgggagacacatcgggacgcacttgtcctggtggataatgtgtatcaccggattgccggtatcagtaaggatgacgggctgataaccctgcaggatgcggaaggtaacacgcggttgatttctccccgggaggcggtggctgaaggtgtcacactgtacaccccggacaccatcagggtggggaccggtgaccggatgcgcttcacgaagagtgaccgggagcgcggttatgtggccaacagcgtctggacggtgacagcagtttccggtgacagtgtcacgctgtcggacggacagcagacccgggagattcgccccggccaggagcaggcagagcaacatattgacctggcctatgccatcaccgctcacggtgcgcagggggcaagtgaaacctttgccattgcgcttgaaggaacggaaggtaaccggaaactgatggccggctttgagtcagcctacgtggccctgtcgcgtatgaagcagcatgtgcaggtgtacaccgataaccgtcagggctggacggatgccattaacaatgccgtacagaaaggaacggcccacgatgtatttgagccgaaaccggaccgggaggtcatgaatgcagagcggctgttcagtacggcgcgggaactgcgggacgtggcggcagggcgtgctgttctccgtcaggcggggctggccgggggagacagtccggcacggtttattgcaccggggcgcaaatatccgcagccgtatgtggcactgccggcgtttgaccgtaacggcaagtcagcaggtatctggctgaacccactgaccacggatgacggaaacgggctgcggggattcagtggtgaaggacgggtgaaaggcagcggggatgcgcagttcgtggccctgcagggcagccgtaacggagagagcctgctggctgataatatgcaggatggtgtccggattgcccgtgataatcctgacagcggtgtggtggtgagaatcgccggtgaaggtcgtccgtggaatcccggtgccatcaccggtggtcgcgtgtggggggatatcccggacaacagtgtccagccgggagccggaaatggcgaaccggtcacggcagaggtgctggcacagcggcaggctgaagaggccatccgtcgtgaaacggaacgccgcgcagatgaaattgtccgtaaaatggcagagaacaaacctgacctgccggatggcaaaacagagcaggctgtcagggagattgccgggcaggagcgtgaccgggctgccataactgaacgggaagccgcgctgccggagggtgtactgcgtgaacctcaacgggtgcgggaagctgtcagggaaattgcccgggaaaatctgctgcaggagcgacttcagcagatggagcgggatatggtccgcgacctgcagaaagagaaaaccctgggtggagactgatacaggaagacaaacgctgatgacaacggataacacgaacacgacacgtaacgattcactggttgcccggaccgatacctggttgcagtcgttgctggtctggtcacccggacagcgggatatcatcaaaacggtggcactggtgctgatggttctggaccatgcaaaccgtattctgcatctggaccagtcgtggatgtttctagccgggcgcggggcctttccgctgtttgccctggtgtgggggctgaatctgtcccgtcatgcgcatatccggcaactggccattaaccggctgtggggatgggcagttttttcccagttctggtattactttgccggctttccctggtatgaggggaatatcctgtttgcctttgcagtggcggcacaggtgctgacatggtgtgaaacgcgcagtgggtggcgtactgcagcggccattctcatgatggcactgtgggggcctttgtccggcaccagttacggcattgccgggctgctgatgctggctgtcagccaccggctgtaccgggcggaagacagaatggaacgtctggtgcttgtcgcttgcctgctggccgtgattccggcgcttaaccttgccaccagtgatgcggcggctgtagccggccttgtgatgacggtgctgaccgttggtctggtgtcgtgtgcagggaaattattatcccgtttctggcccggagactttttcccgacgttctatgcctgtcatctggctgtgctgggcgttctggcgctgtgacgggtgtggtatctttggccgcaagaggatgattcgtcaggaccggaaggtagcagccaaggcgggggactcgagtgccgggatgtggctgatggggccaccaccttgcgctcgttcgccagccaggacagaaatgcctcgacttcgctgctgcccaaggttgccgggtgacgcacaccgtggaaacggatgaaggcacgaacccagtggacataagcctgttcggttcgtaagctgtaatgcaagtagcgtatgcgctcacgcaactggtccagaaccttgaccgaacgcagcggtggtaacggcgcagtggcggttttcatggcttgttatgactgtttttttggggtacagtctatgcctcgggcatccaagcagcaagcgcgttacgccgtgggtcgatgtttgatgttatggagcagcaacgatgttacgcagcagggcagtcgccctaaaacaaagttaaacatcatgagggaagcggtgatcgccgaagtatcgactcaactatcagaggtagttggcgtcatcgagcgccatctcgaaccgacgttgctggccgtacatttgtacggctccgcagtggatggcggcctgaagccacacagtgatattgatttgctggttacggtgaccgtaaggcttgatgaaacaacgcggcgagctttgatcaacgaccttttggaaacttcggcttcccctggagagagcgagattctccgcgctgtagaagtcaccattgttgtgcacgacgacatcattccgtggcgttatccagctaagcgcgaactgcaatttggagaatggcagcgcaatgacattcttgcaggtatcttcgagccagccacgatcgacattgatctggctatcttgctgacaaaagcaagagaacatagcgttgccttggtaggtccagcggcggaggaactctttgatccggttcctgaacaggatctatttgaggcgctaaatgaaaccttaacgctatggaactcgccgcccgactgggctggcgatgagcgaaatgtagtgcttacgttgtcccgcatttggtacagcgcagtaaccggcaaaatcgcgccgaaggatgtcgctgccgactgggcaatggagcgcctgccggcccagtatcagcccgtcatacttgaagctagacaggcttatcttggacaagaagaagatcgcttggcctcgcgcgcagatcagttggaagaatttgtccactacgtgaaaggcgagatcaccaaggtagtcggcaaataatgtctaacaattcgttcaagccgacgccgcttcgcggcgcggcttaactcaagagaggaagagtaaggatggaacgggatatattttctgcgatattaccgaaaccgtatcgatcctcaggtacatcttcaactgccgcatcaagccctttctggttccacagctgcctcagtatcttcatattacagatctccgtacaggcagcgcagcccggtcagggcctccgccagcgggccttcttgacaccgcgtggcgagctcccggaccagcgtctcaaaggcctccgccggcataaaaatccgcaggccgtctatcccgaagaagccctccggcgtgacgtttccgggcggggagaacatcactcgctccccctggtgaccgtgcgtcagggcttccggatgccgggcatacagcgtgaacaggcccagcagttcggataacgcttcccagccgtacggcaccacgaagtcctggccggtgatcagcaggtgcagacggggtgtggtgtaccaggcccccgggcgttctccggggtgctggccgtcaacgcggatctccaggcgcagcgtgccggcctcaatggtttccgtgacggcagaaataaccgggcgcagctcctgtgccagcgttcttgcctgttctgtgttccagtccaggccgcgcagcatcaacgggaaaacagctttcagccgcggcagggtgaagatttctgccagcaccgcgtccggcacctccgccaggccaaaacagtcgctctcgagcggacgcaggaggtgttcggcatacatctgatccaccacggggcgcagcgctgcccggaaggcttcaaactcttccgtccagtttttcccggccaggcggaaaatccccttcaggtagtgaccgtccacagggcgatcgtgctccacctgccaggccagcaggttgccagtgatgtccagcagcgtgtccagggccgggagtgtggccagcctattatgcccgcgcaggaaggcctccctgacgtgaaccaggacaaagcgcagttcgtcgcgggagagcgctgacgtgccgaaggtctggcccagaatgatatgccggtacagctgccggaccgtggcctccggatcggcaatgagctgaaaatacccgtcaccgggcgcgaccgttttcaggccgtcatcgaggaagcgttcggctagggcgttgaccgaagtattttcccgaccggcacgcgttttcagcgcctcgataagttttttgtgaaaacgcaggttaagctggcttagcatcatcgatcctttaatgtttgttttgttcttaatgctaacctagcattttattattagctattaatcagttttttagtttttgaaaattgtgatgcttctaaaattactaaaattgaggattttaatgctacaacaatgcctgcctcttcttatttctccggagatccgaaaaccccaagttacggatcttcctctccctccgcacagcgttacatcccgtcagcacagcatgtagtgcctcatacagttgcccatggcactatatgttgtgttgtatctctggactgtgatgcgccgcgcaggggcggaaaacagcgatatgatgattttctcagcgttgtacacttccggaaagtcgtttattcaaataaagtcggatccatacgaaacgggaatgcggtaattacgctttgtttttataagtcagattttaatttttattggttaacataacgaaaggtaaaatacataaggcttactaaaagccagataacagtatgcgtatttgcgcgctgatttttgcggtataagaatatatactgatatgtatacccgaagtatgtcaaaaagaggtgtgctatgaagcagcgtattacagtgacagttgacagcgacagctatcagttgctcaaggcatatgatgtcaatatctccggtctggtaagcacaaccatgcagaatgaagcccgtcgtctgcgtgccgaacgctggaaagcggaaaatcaggaagggatggctgaggtcgcccggtttattgaaatgaacggctcttttgctgacgagaacagggactggtgaaatgcagtttaaggtttacacctataaaagagagagccgttatcgtctgtttgtggatgtacagagtgatattattgacacgcccgggcgacggatggtgatccccctggccagtgcacgtctgctgtcagataaagtctcccgtgaactttacccggtggtgcatatcggggatgaaagctggcgcatgatgaccaccgatatggccagtgtgccggtctccgttatcggggaagaagtggctgatctcagccaccgcgaaaatgacatcaaaaacgccattaacctgatgttctggggaatataaatgtcaggctccgttatacacagccagtctgcagtcatggtaccggcagtgtattctgccgggcagcctgcatcgctgcctgttgccattgattatccggcagctctggcacttcgccagatgtcgatggtccatgatgaactgccaaaatatctgctggctccggaagtgagtgccctgctccattacgtcccggatctgcaccgcaagatgctgctggccacactgtggaacaccggagcacgcattaatgaagcactggcgctgacgcggggggatttttcgcttgcgcctccgtatccgtttgtgcagcttgcgaccctgaaacaacggaccgaaaaagctgccaggacggcggggagaatgcccgccggtcagcagactcaccggctggttccgctctctgactcctggtacgtcagccagctgcagacgatggtggcaacactgaaaatacccatggagcggcgtaaccgtcgcacaggaaggacagagaaagcgcggatctgggaagtgacggacagaacggtcaggacctggattggggaggcggttgccgccgctgctgctgacggtgtgacgttctctgttccggtcacaccacatacgttccgccattcctatgcgatgcacatgctgtatgccggtataccgctgaaagttctgcaaagcctgatgggacataagtccatcagttcaacggaagtctacacgaaggtttttgcgctggatgtggctgcccggcaccgggtgcagtttgcgatgccggagtctgatgcggttgcgatgctgaaacaattatcctgagaataaatgccttggcctttatatggaaatgtggaactgagtggatatgctgtttttgtctgttaaacagagaagctggctgttatccactgagaagcgaacgaaacagtcgggaaaatctcccattatcgtagagatccgcattattaatctcaggagcctgtgtagcgtttataggaagtagtgttctgtcatgatgcctgcaagcggtaacgaaaacgatttgaatatgccttcaggaacaatagaaatcttcgtgcggtgttacgttgaagtggagcggattatgtcagcaatggacagaacaacctaatgaacacagaaccatgatgtggtctgtccttttacagccagtagtgctcgccgcagtcgagcgacagggcgaagccctcgagtgagcgaggaagcaccagggaacagcacttatatattctgcttacacacgatgcctgaaaaaacttcccttggggttatccacttatccacggggatatttttataattattttttttatagtttttagatcttcttttttagagcgccttgtaggcctttatccatgctggttctagagaaggtgttgtgacaaattgccctttcagtgtgacaaatcaccctcaaatgacagtcctgtctgtgacaaattgcccttaaccctgtgacaaattgccctcagaagaagctgttttttcacaaagttatccctgcttattgactcttttttatttagtgtgacaatctaaaaacttgtcacacttcacatggatctgtcatggcggaaacagcggttatcaatcacaagaaacgtaaaaatagcccgcgaatcgtccagtcaaacgacctcactgaggcggcatatagtctctcccgggatcaaaaacgtatgctgtatctgttcgttgaccagatcagaaaatctgatggcaccctacaggaacatgacggtatctgcgagatccatgttgctaaatatgctgaaatattcggattgacctctgcggaagccagtaaggatatacggcaggcattgaagagtttcgcggggaaggaagtggttttttatcgccctgaagaggatgccggcgatgaaaaaggctatgaatcttttccttggtttatcaaacgtgcgcacagtccatccagagggctttacagtgtacatatcaacccatatctcattcccttctttatcgggttacagaaccggtttacgcagtttcggcttagtgaaacaaaagaaatcaccaatccgtatgccatgcgtttatacgaatccctgtgtcagtatcgtaagccggatggctcaggcatcgtctctctgaaaatcgactggatcatagagcgttaccagctgcctcaaagttaccagcgtatgcctgacttccgccgccgcttcctgcaggtctgtgttaatgagatcaacagcagaactccaatgcgcctctcatacattgagaaaaagaaaggccgccagacgactcatatcgtattttccttccgcgatatcacttccatgacgacaggatagtctgagggttatctgtcacagatttgagggtggttcgtcacatttgttctgacctactgagggtaatttgtcacagttttgctgtttccttcagcctgcatggattttctcatactttttgaactgtaatttttaaggaagccaaatttgagggcagtttgtcacagttgatttccttctctttcccttcgtcatgtgacctgatatcgggggttagttcgtcatcattgatgagggttgattatcacagtttattactctgaattggctatccgcgtgtgtacctctacctggagtttttcccacggtggatatttcttcttgcgctgagcgtaagagctatctgacagaacagttcttctttgcttcctcgccagttcgctcgctatgctcggttacacggctgcggcgagcgctagtgataataagtgactgaggtatgtgctcttcttatctccttttgtagtgttgctcttattttaaacaactttgcggttttttgatgactttgcgattttgttgttgctttgcagtaaattgcaagatttaataaaaaaacgcaaagcaatgattaaaggatgttcagaatgaaactcatggaaacacttaaccagtgcataaacgctggtcatgaaatgacgaaggctatcgccattgcacagtttaatgatgacagcccggaagcgaggaaaataacccggcgctggagaataggtgaagcagcggatttagttggggtttcttctcaggctatcagagatgccgagaaagcagggcgactaccgcacccggatatggaaattcgaggacgggttgagcaacgtgttggttatacaattgaacaaattaatcatatgcgtgatgtgtttggtacgcgattgcgacgtgctgaagacgtatttccaccggtgatcggggttgctgcccataaaggtggcgtttacaaaacctcagtttctgttcatcttgctcaggatctggctctgaaggggctacgtgttttgctcgtggaaggtaacgacccccagggaacagcctcaatgtatcacggatgggtaccagatcttcatattcatgcagaagacactctcctgcctttctatcttggggaaaaggacgatgtcacttatgcaataaagcccacttgctggccggggcttgacattattccttcctgtctggctctgcaccgtattgaaactgagttaatgggcaaatttgatgaaggtaaactgcccaccgatccacacctgatgctccgactggccattgaaactgttgctcatgactatgatgtcatagttattgacagcgcgcctaacctgggtatcggcacgattaatgtcgtatgtgctgctgatgtgctgattgttcccacgcctgctgagttgtttgactacacctccgcactgcagtttttcgatatgcttcgtgatctgctcaagaacgttgatcttaaagggttcgagcctgatgtacgtattttgcttaccaaatacagcaatagtaatggctctcagtccccgtggatggaggagcaaattcgggatgcctggggaagcatggttctaaaaaatgttgtacgtgaaacggatgaagttggtaaaggtcagatccggatgagaactgtttttgaacaggccattgatcaacgctcttcaactggtgcctggagaaatgctctttctatttgggaacctgtctgcaatgaaattttcgatcgtctgattaaaccacgctgggagattagataatgaagcgtgcgcctgttattccaaaacatacgctcaatactcaaccggttgaagatacttcgttatcgacaccagctgccccgatggtggattcgttaattgcgcgcgtaggagtaatggctcgcggtaatgccattactttgcctgtatgtggtcgggatgtgaagtttactcttgaagtgctccggggtgatagtgttgagaagacctctcgggtatggtcaggtaatgaacgtgaccaggagctgcttactgaggacgcactggatgatctcatcccttcttttctactgactggtcaacagacaccggcgttcggtcgaagagtatctggtgtcatagaaattgccgatgggagtcgccgtcgtaaagctgctgcacttaccgaaagtgattatcgtgttctggttggcgagctggatgatgagcagatggctgcattatccagattgggtaacgattatcgcccaacaagtgcttatgaacgtggtcagcgttatgcaagccgattgcagaatgaatttgctggaaatatttctgcgctggctgatgcggaaaatatttcacgtaagattattacccgctgtatcaacaccgccaaattgcctaaatcagttgttgctcttttttctcaccccggtgaactatctgcccggtcaggtgatgcacttcaaaaagcctttacagataaagaggaattacttaagcagcaggcatctaaccttcatgagcagaaaaaagctggggtgatatttgaagctgaagaagttatcactcttttaacttctgtgcttaaaacgtcatctgcatcaagaactagtttaagctcacgacatcagtttgctcctggagcgacagtattgtataagggcgataaaatggtgcttaacctggacaggtctcgtgttccaactgagtgtatagagaaaattgaggccattcttaaggaacttgaaaagccagcaccctgatgcgaccacgttttagtctacgtttatctgtctttacttaatgtcctttgttacaggccagaaagcataactggcctgaatattctctctgggcccactgttccacttgtatcgtcggtctgataatcagactgggaccacggtcccactcgtatcgtcggtctgattattagtctgggaccacggtcccactcgtatcgtcggtctgattattagtctgggaccacggtcccactcgtatcgtcggtctgataatcagactgggaccacggtcccactcgtatcgtcggtctgattattagtctgggaccatggtcccactcgtatcgtcggtctgattattagtctgggaccacggtcccactcgtatcgtcggtctgattattagtctgggaccacggtcccactcgtatcgtcggtctgattattagtctgggaccacggtcccactcgtatcgtcggtctgattattagtctgggaccacgatcccactcgtgttgtcggtctgattatcggtctgggaccacggtcccacttgtattgtcgatcagactatcagcgtgagactacgattccatcaatgcctgtcaagggcaagtattgacatgtcgtcgtaacctgtagaacggagtaacctcggtgtgcggttgtatgcctgctgtggattgctgctgtgtcctgcttatccacaacattttgcgcacggttatgtggacaaaatacctggttacccaggccgtgccggcacgttaaccgggctgcatccgatgcaagtgtgtcgctgtcgacggcctcctcacccggtcacgtttcgtcgtttctcctccacgcgctgcggcttcggggccgcacctgcattcgtatgcggtcgcccggttacaggtgcggcacggcctgatggaggccgcatgtgagaggagaattcccatgccaaactggtgctcgaatcgtatgtatttttctggtgaaccggcacagatcgctgagattaaacgactggccagcggtgcagtcacaccgctttatcgccgcgccacaaatgaaggtattcagctgtttctggccggaagtgccggacttctgcagaccactgaagatgtgcggtttgaaccatgccccggactgacggctgctgggcgtggcgttgtatcgccggagaatatcgcgttcacccgctggctgacacacctgcaggacggtgtacttctggatgagcaaaactgcctgatgctgcatgaactctggctgcagagcggtactggccggcgtcgctgggaagaattaccggatgatgccagggaaagcattaccgctcttttcaccccaaaaagaggtgactggtgcgacatctggagtaacgaggatgtatcggtgtggtggaaccgtctgtgtgacaacgtcctgccggaaaaaccatgccgtttgacctgctgacggttctgttcactcgcctggatgttgaagtgaatggctttaacggtggtgttctgaacggtgttccttctgcatatcactggtatacggaacagtatggcgtgaaggggccttgtgggtatgaggtgaatatcagcagtcagggagacaacttcattcaggttgatttcgacacgccgtggtgtcagccggaaagcgacgttattgcagtattaagccgccgtttcagttgcacgctggagcactggtacgccgagcagggctgcaatttctgtggctggcagcgatatgagcgtggagagcttgttgatgtgctgtggggggaactggaatggtcttccccgacagatgatgatgagctgccggaagtcaccgcgccggagtggatagtcgacaaggtggcgcattacggtggatgaagtatgacggagactggcgggcaaccgcccgtttcttttccggtaaaggatgtcgccgggctcctctttttactgcgccggctgacgcggcgcggcaggaacgctgcctgtggtcagtgtcccgcgtccggctgggcacgggacgggcgcttttaccgctcccggctggcatcggtgacagtgtacgccagcccgtcgcccttttctgatgaacgcccttcaagccgctttcgcggcatattctcgccgtcaaaaagacgacggctgcgatattccacggtcggcctgacccgttaccggacgcggtgaacagcccacaggccgcggggaacgggcgccacaggggcgccctcccggtgccctctgtaagagaaggagtgctgttatgtcccgttttatccagggtgactgcgtgcgtgttatggccacgtttccgggcaatgctgtcgatttcatcctcaccgacccgccatatctcgtcggtttccgtgaccgtcaggggcgtaccatcgccggcgataaaaccgatgaatggctgcaaccggcctgtaatgaaatgtaccgcgtgctgaaaaaagatgcgctgatggtgagcttctatggctggaaccgcgtcgatcgctttatggccgcctggaaaaatgcgggattcagcgtggttggccacctggtgtttaccaaaacctacacatcgaaggccgcatatgtgggctatcgccacgaatgcgcttacatcctggcaaaagggcgtccggcgctgcctcagaagccattgcccgacgtgctgggctggaaatattcaggcaatcgtcatcacccgacggaaaagcctgttaccagcctgcaaccactgattgagagcttcacacacccgaacgcgattgtgctggacccgtttgcaggcagcggctcaacctgtgtggccgcccttcagtccggacgccggtatatcggtatcgagctgcttgaacagtatcaccgtgccggacagcaacgtctggctgccgtacagcgggccatgcagcagggggctgcaaatgatgactggtttatgccggaggctgcgtaaatgaactatgccggacataaaaaacttcgcgccgacgtggcggaggtggccaacaccatgtgtgaccttcgggccaggctgaacgatatggagcatcgctgtcgctttgattccgatgtgcttgttgaacgcctggcacgccagacgctgtatcgcgccaatcgcctgttcatggaggcgtataccgaaattctggaactggatgcgtgctttaaagattgagaaggagacgagaatgtacggaacatgcgaaacgctatgccgggagctggcagcaaagtatccgggatatacaccgctgatgctggttatctggtccccggaagagattcaggccctcgctgacggaatggatatttccctgtccgatcctgaaatcaggaccgtcctggcgcgcctggaggacatcccggaagaccagcgaattgagtccggtatttcttctgccgcggcgatggagattatcagcaacgtgagcgaaaaccgccaggtgaccgtcccggctgaactgctggcgtccctgattcagaccgccgaacaggcactgtggaaacgtgaatgggccgcccgtgattacggcctcgccgtcccggaatgcgttacccgccgtcaggcggtggttaatcaggcccgcatcctgctgaaaaacaacacacacgaaaacggctgatgttatcgccgcctgcgggcggcgatacagggagaacgattaatcatgaacgaaaacacaacgctgaacgcactgatttgtcgtcacgcccgtaacctgctgctggcgcagggctggccggaagagacggatgtcgaccagcgtaacccgaagtatccgggctggatcagcatttatgttctgctggatgcgccccggctggcgacgttactcgttaaccgccacggcggcgtactgccgccgcacctggcctccgccattcagaaactgaccggaaccggagcggaacttgttctgtccggcagtcagtggcagtcgctgccggtgcttccggcagacggaacgcaggtgtcttttccgtatgccggtgaatggctgaccgaagacgaaatcagggctgtacttgcggcggtgcgcgatgcggtacgcagtgtcagttgccgggtggcagaagatatgcggcgtatccgggcggcgctgaccaccaccggtcagacgttactgacccgccagactcgccgctttcgcctggtcgtgaaggaaagcgatcacccctgctggctcgatgaggacgacgaaaacctgcccgtggtgctcgatgccatcctgaaccggggcgcacgtttttcggcggtggaaatgtatctggtcagcgattgtattgaacatatcctgtctagtgggctggcctgcgatgtgctgcgtataccggatgaaccgccccgccagtggtttgaccgtggtgttctgcgggaagttgtccgggaagcccgggccgaaatccgcagcatggcggatgccctggcaaaaatcaggggctgatgatggcggggaaaatccccgctttttttctgccggtccccggacagagcacaaaggaagtcgccgccggctccgctttacccggccatgcaggcatggccttgtgggttttcagttatgtggccgccgtgtcgtgtgcgggcggtgccgtgcctccatcttagccgggctggcggggatgcaagggtacgcttcgccgctgcggtcacccggtccctccttcccgtctgccgtgattttccggtcgttcacccgctcaggtttcgcggtctcaccctccaactcccgtcagccgtgtgcgtcaggctgcggcttcccttgcgccctgtgcatccccgccttatcgcccggcttttatggaggcacggcaccgcccggtgtcgcggaatatgtgaataacggaggaaaacatcatgcaatatgcgaaacctgtcactctgaacgttgaagagtgcgaccgtctctcctttctgccttacctgtttggcaacgattttctgtatgccgaggcgtatgtgtacgcgctggcgcaaaaaatgatgccggaatatcagggaggcttctggcacttcatccgcctgccggacggtggcggttacatgatgccggatggcgaccgttttcatctggtcaacggtgaaaactggtttgaccgcacggtcagcgccgatgccgcaggcatcattctgacttcccttgtgattaaccgccagttgtggctgtaccacgacagcggggatgtaggactgacccagctttaccggatgcgcgatgcgcagttgtggcgtcacatcgaatttcaccccgaatgcaacgcgatttacgcggcactggactgattaacggacggggcggcaatgccgcccctgtaaaggagacgagaacatgtactgtactgttaaagaaatcatccgcgatgtactggatacagacgtgccggacagtgaatgcgtttttgccgtggtgctgacccgtggggatgtgcgccacatagcccaggactggaacctgtcagacgatgagctggaaaccgtcatgcagcggctggacgatgcctttgaatatggtgcggatgtcagcattgttcacgacgttgttcgtgagctgatggaagaaaagcgtgccagccgtcaggtgacagttccggcggtgatgctggaaaaagtgatggcgctggcaggcagtgaaatgaagcgcctgtatgccgtcgggagtgagaacgggggcgacggtgatgcgttcgtcagggaggaacgcgaagcaatggacgttgtgttacaggcgctggacggggagcacatgtcatgaatatcagcacagaaacccgcgaaattctgcgcaattacaaagccgtgattaatgcgcgacgtcgtgaaatggggcagaaaccgctcaccaccgcgcagattgttgatgaaatctgcgattttgtggcgaatcagcaggctgttttcctgggcggtcactacatcttacagggcagcagaaacaggtgatacagggcaggcggtggaggccgcctgtcagcccgcgcgaaaacccctggcaggctgacgcctgccggaagggaagcgggccacgctgacgcgtcgcccgttacccttcctgtttgtgatgtgtccggaatgtttttttctgatgttatttttctgtggttaccgtgcctgttactgttcttcttctttttcctcttcctcttcttcctcttcttcctcttctttccgttcctctcctgcttatggcttttccgggcgtccccctggtggggcgggctgtcgtgaacggagccagcgaagctgtctccgccctggcgggcttccatccctgacgcgaaaccctggcttgcagcgaccgttccggtcgcgccgcctctgtcgcgccgtggcctgcgctcccggcatcccggcaaaaggccgccgggatgtaaggggcaacgccgtttcgcaaaccgcgcttcacgtcgttgcggcgggtccctgctcattgcctgccgggtgccacacacccgtatgagtccctgtcgccggggctgatacagccacaacctgccgcactgactgtccagggtaaatgaacagcccacaaaattttttacccaaaacccggtaaaaaattttgcgttctgcccaggacaggtgtgtcaggccgtggcagtgatgccccttgcggcgaaggttctcaaaaaggtgatggtgaataccggagggaacaaaaggcaggtccccgcaaaacgtcaaaaccgcggctcccgaaactcaaaagatgatgggggctgaaaacatcaacagaaggagacacatcatggcagttcgtggcattaacaaggtcatcctcgtaggacgcctgggaaaggatccggaagtccgttacatccccaacgggggcgcagtggcaaacctgcaggtggccacgtcagaaagctggcgtgacaaacagacgggggagatgcgggagcagacagaatggcatcgcgtggtgctgttcggcaagctcgcggaagtggcaggtgaatgtctgcgcaagggcgcgcaggtctacatcgaaggtcagcttcgcacccgtagctgggaggataacggtatcacccgttacgtcaccgaaattcttgttaagaccacgggcaccatgcagatgctggtacgtgccgcaggtgctcagactcagccggaagaggggcaacagttcagcggtcagcctcagccggaaccacaggcggaggccggtacgaaaaaaggtggcgcaaaaacgaaaggccgtggacgtaaggccgcgcagccggagcctcagccgcaaccgccggagggtgacgattacgggttttcagac

SEQ ID NO: 5619 - DNA, 30000 bp, Artificial Sequence
  Description of Artificial Sequence: Synthetic polynucleotide
tgacagcgtcagggataaagccagcgacaaggataaggagcgggtgaccaaaaacatcaacatcatgtggaatgcgctttccaaaaacagaatgtttgacggcaacaaagagctgaaagagtttgtgatgacgctgaccggctcactggtgtttggtcccaacggcgaaatcacaccgctgtcagccagaaccactgaccgttcaattatccgggccatgatggaaggcggcacagcaaaaatttctcactgcaacgattctgataaatgcctgaaagtggtggcagacacaccggtgaccatcagccgggataatgcactgaagtctcagattactaaacttctggccagcattcagaacaaggctgtcagtgacacgcctctggatgacaaggaaaaaggctttatttccagtaccaccatccccgtcttcaaatacctggttgacccgcagatgctcggtgtttccaacagtatgatttaccagctgacggactatatcggttacgacatcctgctgcagtacattcaggagctgatacagcaggcacgggcgatggtggccacgggaaattatgacgaagcggttatcgggcatattaacgacaacatgaatgatgccacccggcagattgcggcgtttcagtcacaggtgcaggtacagcaggatgcgctgctggttgtcgatcgtcagatgagctacatgcgtcagcagctttccgcccgcatgctcagtcgttaccagaacaactatcacttcggagggagcacgctgtgaatgaagtttatgtgattgccggtggtgagtggttgcggaataacctgaacgccattgccgcctttatgggaacctggacgtgggattccattgaaaaaattgcgctcacattgtctgttctcgcggtggccgtaatgtgggtacagcggcacaacgtgatggatttgctgggctgggtggccgtgtttgtgcttatcagcctgctggttaatgtccgcacatcggtgcagattattgataacagtgacctggtcaaagttcaccgggtggataatgtgccggtcggtctggcgatgccactttcactgacgacccgtatcgggcatgcaatggtggccagttacgagatgatcttcacgcaaccggacagcgtcacctacagcaaaacggggatgctgttcggggcgaatctgattgtgaaaagcaccgatttcctgtcccggaatccggaaatcatcaatctgttccaggactacgtccagaactgcgtgctgggtgatatttacctgaatcataaatacacgctggaagacctgatggcctccgctgacccctacacgctgattttttcccgccccagcccgctacggggcgtttatgacaacaataataatttcataacttgtaaggatgcgtcggtcacgctgaaagacaggctgaatctcgatacaaagacgggaggcaagacctggcattattatgtgcagcagatatttggcggcagaccggacccggacctgttattcagacaactggtcagtgacagttacagttatttctacggctccagtcagtctgccagccagattatgcgccagaacgtcaccatgaatgccctgaaagagggtatcaccagtaatgcagcccgtaacggtgacaccgccagcctggtaagtctggccaccacgtcatcgatggagaaacaacgtctggcacatgtctccattggtcatgtaactatgcgaaacctgccgatggtccagactatcctgacggggattgccattggtatattcccgctcctgatactggcggctgtctttaacaagctgacattgtctgtattaaaggggtatgtgtttgccctgatgtggctgcagacctggccgttgttgtatgccattctgaacagtgccatgacattctatgcgaaacagaatggtgcgccggtcgtgttgtctgaactctctcagatacagctgaaatactctaacctggcctccactgccgggtatctttcagccatgatccccccgttgtcatggatgatggtaaaaggccttggcgcaggtttttccagcgtgtacagccacttcgcctcttcatctatcagtccaacggccagtgcagcaggcagtgtggttgacggtaattactcctacggcaacatgcagacggaaaacgtgaacggcttcagctggagcaccaacagcaccacgtcgtttggtcagatgatgtaccagaccggcagtggcgcaaccgccacacagacccgtgacggtaatatggtgatggatgcaagcggagcgatgtcccggttaccggtcggtatcaatgcaacgcgtcagattgcagcggcacaacaggaaatggcccgggaggcgtcgaacagagccgaaagtgccctgcatggtttcagcagcagtattgccagtgcctggaacacactcagtcagtttggctctaaccgggggagcagtgactctgtcactggtggtgctgacagcacgatgagtgctcaggactccatgatggccagccgtatgcgcagtgcagtggaaagctatgcgaaggcgcataatatcagtaatgagcaggcgacgagagaactggcctcgagaagtacaaatgcgtcgcttggcctttacggtgatgcttatgctaaagggcatttaggcataagtgtattgggtaacggtggaggggttggtctccaggccggagctaaggcaagcattgatggcagtgatcttgactcacatgaagccagtagtggttcacgggccagccatgatgctcgtcatgatatcgatgccagagctacacaagactttaaagaagccagcgattactttaccagccgcaaagtcagtgaatccggcagccatactgacaataatgctgattcccgtgtggatcagttgtctgcagccctgaattcagcgaaacagagttacgaccagtacacgacgaatatgacccgcagccatgaatatgctgaaatggcatcccgtactgagagtatgagtgggcagatgagtgaagatctgtcgcaacagtttgcacagtatgtgatgaaaaacgcaccgcaggatgttgaagctattctgacaaataccagttcgccggagattgcagaacgccgtcgggctatggcgtggtcttttgtgcaggaacaggtacagcctggtgttgataacacctggcgtgaatcccgtagagatataggtaaaggaatggagagcgtaccttcgggtggtggcagccaggatattattgctgatcatcagggacatcaggccattattgagcaaagaacgcaggacagtaatatccgtaatgatgtaaaacatcaggttgataatatggtcacagaatatcgaggtaatatcggagatactcagaacagcatccgaggcgaggaaaatattgtaaaagggcagtattctgaactacaaaatcatcataaaacagaagcattaactcagaataataaatataatgaagaaaagctggctcaggaaagaatacctggtgctgatagtccgaaagagcttttagagaaagcaaagagttaccagcataaagaataatcataacatgttgggtagggtatggagagaccatgattacacaacaaattatcagtagtgagttggaagttttaaagaaacatattgactcaggagatattagaattccgtcactatggcagggattaaaacccgggcttatcatcatggggtggatgattttttgtcccttgctaatgtcatttctaataacacaaaagacaagtgaaacactcactgctgtgttagccggaggatggcttggacttattattctgtttattgtggcaaggattagaatgttatatttctctctgccggaagaattcctaaagacatcatccgtaatgagggttatatcatcaaaacttaaagtgtatttcattgtgtatatgggagttatatttttatggtcttttttaggtggagggattatatacggttttggcgcaattttagtgacggttattatggcgttcttgattcaattagatatcggtagatatcaatttgttggtgttattgatgcaatcaatagttacgtcaaaaacaagaagttatcaagagtaaaataaaagatattagagagtaaatatatgatgaaaacaaaaaaactaatgatggttgcactggtcagttccactctggccctttcagggtgtggtgcgatgagcacagcaatcaagaagcgtaaccttgaggtgaagactcagatgagtgagaccatctggcttgaacccgccagcgaacgcacggtatttctgcagatcaaaaacacgtctgataaagacatgagtgggctgcagggcaaaattgctgatgctgtgaaagcaaaagggtatcaggtggtgacttctccggataaagcctactactggattcaggcgaatgtgctgaaggccgataagatggatctgcgggagtctcagggatggctgaaccgtggttatgaaggcgcagcagttggtgcagcgttaggtgccggtatcaccggatataattccaattctgccggtgccacactcggtgtgggccttgctgccggtctggtgggtatggctgcagatgcgatggtggaagatgtgaactataccatgatcacggatgtgcagattgcagagcgtactaaggcaacggtgacaacggataatgttgccgccctgcgtcagggcacatcaggtgcgaaaattcagaccagtacagaaacaggtaaccagcataaataccagacccgtgtggtctcaaatgcgaacaaggttaacctgaaatttgaagaggcgaagcctgttctcgaagaccagctggccaaatcaatcgcaaatattctctgattatcttccggaggctggtctgaccggcctcctgactgacgcctcgctttgctcgttgtccaaccccggaaagaaataaaataaattttatttctccccggcgtttccgaaataaatatgaaaacactgagcggttgtgcaaattctttgtgcgaccgtgaagtgttgccggcgaagccggaatttaacggttattaatcttttcatcattaataatcagtccgactgactttttttcttcggaatatcatcatgagttttaacgcaaaggatatgacccagggcggtcagattgcgtccatgcgtatccgcatgttcagccagatcgccaatatcatgctttactgcctgtttatttttttctggatactcgttggtctggttttatggataaaaataagctggcagacgtttgtgaacggctgtatttactggtggtgtaccacgctggaaggcatgcgggatttaatcaaatcccagccggtctatgagatccagtattacggtaaaaccttccgcatgaacgctgctcaggtactgcatgacaaatatatgatctggtgcagtgagcagttatggtccgccttcgtgctggctgctgttgtggcactggttatttgcctgattaccttctttgttgtctcctggattctggggcgtcagggtaaacaacagagcgaaaatgaagtcacaggtggtcgtcagctgacagacaatccgaaagacgttgcccggatgctgaaaaaagacggcaaggactccgatatccggattggagacctgccgattatccgggattccgaaatccagaacttctgtctgcacggcacggtcggggccggtaagtcggaagttatccgtcgtctggccaactacgcccgtcagcgcggtgatatggtggtgatttatgaccgttcgggggaatttgttaaaagttactatgatccctccatcgataaaatcctgaatccgctggatgcccgctgtgccgcctgggatttgtggaaggagtgcctgacacagccggattttgataataccgcaaatactctgatcccgatgggtacaaaagaggacccgttctggcagggttcaggacgtaccatttttgcggaagcggcgtatctgatgcgtaatgaccccaaccgcagctacagcaaactggtggacacactgctttccatcaaaattgaaaaactgcgtacctacctgcgtaattcaccggcggccaacctggtggaagagaaaattgagaaaacggcgatttccatccgtgctgtgctgaccaactacgtgaaagccatccgttacctgcaggggattgagcataacggtgagccttttaccatccgtgactggatgcgtggtgtccgggaagatcagaaaaacggctggctgtttatttcgtcgaatgccgacacccatgcctccctgaagccggtgatctccatgtggctgtccattgccattcgtggtctgctggcaatgggagaaaaccgtaaccgtcgtgtgtggtttttctgtgatgagttacccacgttacacaaactgccggacctggtggagatcctgccggaagcccgtaagttcggtggctgttatgtgtttggtatccagtcctatgcccagctggaagatatctacggtgagaaagcggctgcctcgctgtttgacgtcatgaacacccgtgcctttttccgttctcccagccataagattgcagagttcgctgccggtgaaattggtgagaaagagcacctgaaagccagcgagcagtattcctacggtgctgatccggtacgtgacggggtatcgaccggtaaggatatggagcgccagacgctggtcagttattccgacattcagtctctgccggatctgacctgttatgtcaccctgcccggaccgtatccggcagtaaaactctctctgaaatatcagacacgaccgaaggtcgctccggagtttattccgcgtgacatcaacccggaaatggagaaccgtctgagtgccgtacttgccgcaagggaagcagaaggtcgtcagatggccagcctcttcgaaccggatgtcccggaggttgtttccggagaagacgtgactcaggctgaacagccgcaacagccggtgtctcctgccatcaacgataagaagtcagattcaggtgtgaatgttccggcaggggggatcgagcaggagctgaaaatgaaaccggaagaagagatggaacagcaactgccacccgggatcagtgaatccggtgaagtggtggatatggccgcttatgaggcatggcaacaggaaaatcatccggacatccagcagcagatgcagcgtcgtgaagaggtgaacattaatgtgcaccgggagcgcggggaggatgttgagccgggagatgatttctgatgaacaggtcaactccagtcttcaattctcaggccgcccacacgttcaaattcccgggtgttattagtcacaataatcagtccccgactgcgggcatgacctgcgatcatttgatcaaatggcccgacagggcgtccctgaagggcaagttctgctcttatctggccggtgtgtgtggcagcagcagcgtcgtaatccagaacgtcaatgcgggaaacaaatccctcgatcacagcgagattacgttcaggcatctggcttttttctgcaccatatatcacctccatcagagtgaccgaactgatgcacattctcccctggttcaggttaaaacgttccctgacactggcgggtttgttctttatcgtaaaaatgcagatgttggtatcgagcataaacttcagcatcagaatgactccctttcctgcataccaggctgttccctgttatccataaaatcagcgctgacactgtttccgtcgaaccattcgtcccatgtctctccggcaggcgtaatgattcgggttcgtccgacagcaatcacttcaacgcgttttacgttttccggcaatgcaaccgcttttggcagtctgaccgcctggctgcggttgctgagaaatacggtggtttccattatttgcctccttatgtggatatgtcttgtgtatatccattgtgggattgatgccgggatatgtcaaagggatatacgtttatgatgagtattgcgcaggtcagatcggccggaagtgccgggaactattataccgacaaggataattactatgtgctgggcagcatgggagaacgctgggccggcaggggggctgaacagctggggctgcagggcagtgtcgataaggatgtttttacccgtcttctggagggcaggctgccggacggagcggatctaagccgcatgcaggatggcagtaacaggcatcgtcccggctacgatctgaccttctccgcccccaaaagtgtctccatgatggccatgttaggtggcgataagcgcctgattgatgcacataatcaggccgtggattttgctgtccgtcaggtggaggcgctggcctccacacgggtgatgacggacggacagtcagaaacggtgctgaccggtaatctggtgatggcactgtttaaccacgacaccagtcgcgatcaggaaccacagttacacacgcatgcggtggtggctaatgtcacgcagcataatggcgaatggaagacactgagcagtgacaaagtggggaaaacggggttcattgagaatgtgtacgctaatcagattgcctttggcaggctctaccgggaaaaactgaaagagcaggttgaggcgctgggctatgaaactgaagtggttggtaagcacggtatgtgggaaatgccgggtgtaccggtggaggccttttccggacgctcacagactatccgggaggccgtcggggaagacgcctcgctgaaatcccgggatgtggcggcgctggatacgcgtaaatccaaacagcatgtcgatccggagatcaaaatggccgagtggatgcagacgctgaaggaaaccgggttcgacatccgggcatatcgtgacgcggcggatcagcgtgcggatctccgcacgctgacgcccgggcctgcttcacaggacgggccggatgtgcagcaggcggtgacacaggcgattgccggattaagtgaacgaaaagtgcagttcacgtacacggacgtactggccagaacggtcggcatactgccgccggaaaatggtgtgattgaacgggcacgcgccggtatcgatgaggccatcagccgtgagcagcttatccccctcgaccgtgagaaggggctgttcacgtccgggattcatgtgctcgatgagctgtcagtccgggcactcagtcgtgacatcatgaaacagaaccgggtgaccgtacatccggagaaaagtgttccccggacggccggttacagcgatgccgtcagcgtgctggcacaggatcgcccgtcgctggccattgtgtccgggcagggcggtgcagccgggcagcgtgagcgggtggctgaactggtcatgatggcccgggagcaggggcgggaggtgcagattatcgctgctgaccgtcgctcgcagatgaacatgaagcaggatgaacggttgtccggtgagctgataaccggacgtcgtcagctgctggaaggcatggccttcacgccgggcagtactgttatcgttgaccagggcgaaaaactctccctgaaagagacgttaaccctgctggacggtgccgcacgtcataacgtacaggtcctgataaccgacagcgggcagcgaaccggtacaggcagtgcactgatggccatgaaggatgccggggtgaacacatatcgctggcaggggggagaacagcgaccggccaccatcatcagtgaaccggaccgtaatgtccgctatgcccggctggcaggagattttgcggccagcgtgaaagccggagaagagagcgtggcacaggtcagcggggtacgggaacaggccatactgacacaggccattcgcagtgagctgaaaacacagggcgtgctcggactcccggaggtgaccatgactgccctttcaccggtctggctggacagccggagccgttatctgcgggatatgtaccgtccggggatggtgatggagcagtggaacccggagacacgcagtcatgaccgctatgttatcgaccgggtgacggcgcagagtcacagcctgaccctgcgggatgcgcagggtgaaacgcaggtggtgcgtatttcctccctggacagcagctggtcgctgttccggccggaaaaaatgccggtggcagacggcgagcgactgagggtgacagggaaaattcccggactccgcgtctccggcggtgaccgcctgcaggtggcatccgtcagtgaagatgcgatgacggttgttgtgccgggacgggctgaaccggccaccctgcctgtgagcgattcaccgttcacggcactgaagctggagaacggctgggtggaaacgcccgggcattccgtcagcgacagtgcgacggtttttgcctccgtcacacagatggcaatggacaatgccaccctgaacggtctggcccgcagtggtcgtgatgtccggctgtattcctcactggatgaaacccgtactgcggaaaaacttgcccgccatccgtcctttacggtggtttctgagcagataaagacgcgggccggtgagacatcgctggaaacggctatcagtcatcagaagtccgcacttcacacgccggcacagcaggccattcatcttgcccttccggtggtggaaagtaaaaaactggccttcagcatggtggacctgctgacagaggcaaagtcgtttgctgcagaaggaaccggttttactgaactgggaggggaaatcaatgcgcagataaaacggggtgatttactgtatgtggatgtggcaaaaggctatggcacaggtctgctggtttcccgtgcgtcgtatgaggcagaaaagagcattcttcgccatattctcgaaggtaaggaggcggtcatgccgctgatggagagagtacctggcgaactcatggagaaactgacatcaggacagcgtgccgccacccgcatgatactggaaacgtccgaccgtttcacggtggtacagggctatgccggtgtgggtaagaccacacagttccgggcggtgatgtcagccgtgaacatgctgccggagagtgagcgtccccgagtcgtggggctgggtcccacacaccgtgcggtcggggagatgcgcagcgccggcgtggatgcgcagacactggcgtcctttctgcatgacacgcagctgcagcagcgcagcggagaaacgccggatttcagcaacacgctgttcctgctcgatgagagctcaatggtgggcaataccgacatggcacgggcatacgccctgattgcggccggtggcggtagggcggtggccagtggtgacacggaccagctgcaggccatcgcgcccggtcagcctttccgtctccagcagacgcgcagtgctgccgatgtggccatcatgaaggagattgtgcgtcagacgccggaactgcgggaggcggtatacagcctgattaaccgggatgtggaaagggcactgtccgggcttgagagtgtgaaaccgtctcaggtgccacgtcaggagggcgcatgggcaccggagcactccgtgacggagttcagtcacagccaggaagcgaaactggcagaagcgcagcagaaggcgatgctgaaaggcgaggcttttccggatgtccccatgacactgtatgaagccattgtccgcgactataccggcagaacaccggaagcacgggagcagacgctgattgtcacgcacctgaatgaggaccggcgcgtactgaacagcatgattcatgatgtacgggaaaaggccggtgagctggggaaagagcaggtcatggtgcctgtcctgaacacagcgaatatacgtgacggggagctgcgtcgtctctccacctgggagacacatcgggacgcacttgtcctggtggataatgtgtatcaccggattgccggtatcagtaaggatgacgggctgataaccctgcaggatgcggaaggtaacacgcggttgatttctccccgggaggcggtggctgaaggtgtcacactgtacaccccggacaccatcagggtggggaccggtgaccggatgcgcttcacgaagagtgaccgggagcgcggttatgtggccaacagcgtctggacggtgacagcagtttccggtgacagtgtcacgctgtcggacggacagcagacccgggagattcgccccggccaggagcaggcagagcaacatattgacctggcctatgccatcaccgctcacggtgcgcagggggcaagtgaaacctttgccattgcgcttgaaggaacggaaggtaaccggaaactgatggccggctttgagtcagcctacgtggccctgtcgcgtatgaagcagcatgtgcaggtgtacaccgataaccgtcagggctggacggatgccattaacaatgccgtacagaaaggaacggcccacgatgtatttgagccgaaaccggaccgggaggtcatgaatgcagagcggctgttcagtacggcgcgggaactgcgggacgtggcggcagggcgtgctgttctccgtcaggcggggctggccgggggagacagtccggcacggtttattgcaccggggcgcaaatatccgcagccgtatgtggcactgccggcgtttgaccgtaacggcaagtcagcaggtatctggctgaacccactgaccacggatgacggaaacgggctgcggggattcagtggtgaaggacgggtgaaaggcagcggggatgcgcagttcgtggccctgcagggcagccgtaacggagagagcctgctggctgataatatgcaggatggtgtccggattgcccgtgataatcctgacagcggtgtggtggtgagaatcgccggtgaaggtcgtccgtggaatcccggtgccatcaccggtggtcgcgtgtggggggatatcccggacaacagtgtccagccgggagccggaaatggcgaaccggtcacggcagaggtgctggcacagcggcaggctgaagaggccatccgtcgtgaaacggaacgccgcgcagatgaaattgtccgtaaaatggcagagaacaaacctgacctgccggatggcaaaacagagcaggctgtcagggagattgccgggcaggagcgtgaccgggctgccataactgaacgggaagccgcgctgccggagggtgtactgcgtgaacctcaacgggtgcgggaagctgtcagggaaattgcccgggaaaatctgctgcaggagcgacttcagcagatggagcgggatatggtccgcgacctgcagaaagagaaaaccctgggtggagactgatacaggaagacaaacgctgatgacaacggataacacgaacacgacacgtaacgattcactggttgcccggaccgatacctggttgcagtcgttgctggtctggtcacccggacagcgggatatcatcaaaacggtggcactggtgctgatggttctggaccatgcaaaccgtattctgcatctggaccagtcgtggatgtttctagccgggcgcggggcctttccgctgtttgccctggtgtgggggctgaatctgtcccgtcatgcgcatatccggcaactggccattaaccggctgtggggatgggcagttttttcccagttctggtattactttgccggctttccctggtatgaggggaatatcctgtttgcctttgcagtggcggcacaggtgctgacatggtgtgaaacgcgcagtgggtggcgtactgcagcggccattctcatgatggcactgtgggggcctttgtccggcaccagttacggcattgccgggctgctgatgctggctgtcagccaccggctgtaccgggcggaagacagaatggaacgtctggtgcttgtcgcttgcctgctggccgtgattccggcgcttaaccttgccaccagtgatgcggcggctgtagccggccttgtgatgacggtgctgaccgttggtctggtgtcgtgtgcagggaaattattatcccgtttctggcccggagactttttcccgacgttctatgcctgtcatctggctgtgctgggcgttctggcgctgtgacgggtgtggtatctttggccgcaagaggatgattcgacgaagcgtacaacgtttatccgagttcaagagcaagagaacaacgtttacgggcgtgagtaagcgcatacttgcgctcgttcgccagccaggacagaaatgcctcgacttcgctgctgcccaaggttgccgggtgacgcacaccgtggaaacggatgaaggcacgaacccagtggacataagcctgttcggttcgtaagctgtaatgcaagtagcgtatgcgctcacgcaactggtccagaaccttgaccgaacgcagcggtggtaacggcgcagtggcggttttcatggcttgttatgactgtttttttggggtacagtctatgcctcgggcatccaagcagcaagcgcgttacgccgtgggtcgatgtttgatgttatggagcagcaacgatgttacgcagcagggcagtcgccctaaaacaaagttaaacatcatgagggaagcggtgatcgccgaagtatcgactcaactatcagaggtagttggcgtcatcgagcgccatctcgaaccgacgttgctggccgtacatttgtacggctccgcagtggatggcggcctgaagccacacagtgatattgatttgctggttacggtgaccgtaaggcttgatgaaacaacgcggcgagctttgatcaacgaccttttggaaacttcggcttcccctggagagagcgagattctccgcgctgtagaagtcaccattgttgtgcacgacgacatcattccgtggcgttatccagctaagcgcgaactgcaatttggagaatggcagcgcaatgacattcttgcaggtatcttcgagccagccacgatcgacattgatctggctatcttgctgacaaaagcaagagaacatagcgttgccttggtaggtccagcggcggaggaactctttgatccggttcctgaacaggatctatttgaggcgctaaatgaaaccttaacgctatggaactcgccgcccgactgggctggcgatgagcgaaatgtagtgcttacgttgtcccgcatttggtacagcgcagtaaccggcaaaatcgcgccgaaggatgtcgctgccgactgggcaatggagcgcctgccggcccagtatcagcccgtcatacttgaagctagacaggcttatcttggacaagaagaagatcgcttggcctcgcgcgcagatcagttggaagaatttgtccactacgtgaaaggcgagatcaccaaggtagtcggcaaataatgtctaacaattcgttcaagccgacgccgcttcgcggcgcggcttaactcaagagaggaagagtaaggatggaacgggatatattttctgcgatattaccgaaaccgtatcgatcctcaggtacatcttcaactgccgcatcaagccctttctggttccacagctgcctcagtatcttcatattacagatctccgtacaggcagcgcagcccggtcagggcctccgccagcgggccttcttgacaccgcgtggcgagctcccggaccagcgtctcaaaggcctccgccggcataaaaatccgcaggccgtctatcccgaagaagccctccggcgtgacgtttccgggcggggagaacatcactcgctccccctggtgaccgtgcgtcagggcttccggatgccgggcatacagcgtgaacaggcccagcagttcggataacgcttcccagccgtacggcaccacgaagtcctggccggtgatcagcaggtgcagacggggtgtggtgtaccaggcccccgggcgttctccggggtgctggccgtcaacgcggatctccaggcgcagcgtgccggcctcaatggtttccgtgacggcagaaataaccgggcgcagctcctgtgccagcgttcttgcctgttctgtgttccagtccaggccgcgcagcatcaacgggaaaacagctttcagccgcggcagggtgaagatttctgccagcaccgcgtccggcacctccgccaggccaaaacagtcgctctcgagcggacgcaggaggtgttcggcatacatctgatccaccacggggcgcagcgctgcccggaaggcttcaaactcttccgtccagtttttcccggccaggcggaaaatccccttcaggtagtgaccgtccacagggcgatcgtgctccacctgccaggccagcaggttgccagtgatgtccagcagcgtgtccagggccgggagtgtggccagcctattatgcccgcgcaggaaggcctccctgacgtgaaccaggacaaagcgcagttcgtcgcgggagagcgctgacgtgccgaaggtctggcccagaatgatatgccggtacagctgccggaccgtggcctccggatcggcaatgagctgaaaatacccgtcaccgggcgcgaccgttttcaggccgtcatcgaggaagcgttcggctagggcgttgaccgaagtattttcccgaccggcacgcgttttcagcgcctcgataagttttttgtgaaaacgcaggttaagctggcttagcatcatcgatcctttaatgtttgttttgttcttaatgctaacctagcattttattattagctattaatcagttttttagtttttgaaaattgtgatgcttctaaaattactaaaattgaggattttaatgctacaacaatgcctgcctcttcttatttctccggagatccgaaaaccccaagttacggatcttcctctccctccgcacagcgttacatcccgtcagcacagcatgtagtgcctcatacagttgcccatggcactatatgttgtgttgtatctctggactgtgatgcgccgcgcaggggcggaaaacagcgatatgatgattttctcagcgttgtacacttccggaaagtcgtttattcaaataaagtcggatccatacgaaacgggaatgcggtaattacgctttgtttttataagtcagattttaatttttattggttaacataacgaaaggtaaaatacataaggcttactaaaagccagataacagtatgcgtatttgcgcgctgatttttgcggtataagaatatatactgatatgtatacccgaagtatgtcaaaaagaggtgtgctatgaagcagcgtattacagtgacagttgacagcgacagctatcagttgctcaaggcatatgatgtcaatatctccggtctggtaagcacaaccatgcagaatgaagcccgtcgtctgcgtgccgaacgctggaaagcggaaaatcaggaagggatggctgaggtcgcccggtttattgaaatgaacggctcttttgctgacgagaacagggactggtgaaatgcagtttaaggtttacacctataaaagagagagccgttatcgtctgtttgtggatgtacagagtgatattattgacacgcccgggcgacggatggtgatccccctggccagtgcacgtctgctgtcagataaagtctcccgtgaactttacccggtggtgcatatcggggatgaaagctggcgcatgatgaccaccgatatggccagtgtgccggtctccgttatcggggaagaagtggctgatctcagccaccgcgaaaatgacatcaaaaacgccattaacctgatgttctggggaatataaatgtcaggctccgttatacacagccagtctgcagtcatggtaccggcagtgtattctgccgggcagcctgcatcgctgcctgttgccattgattatccggcagctctggcacttcgccagatgtcgatggtccatgatgaactgccaaaatatctgctggctccggaagtgagtgccctgctccattacgtcccggatctgcaccgcaagatgctgctggccacactgtggaacaccggagcacgcattaatgaagcactggcgctgacgcggggggatttttcgcttgcgcctccgtatccgtttgtgcagcttgcgaccctgaaacaacggaccgaaaaagctgccaggacggcggggagaatgcccgccggtcagcagactcaccggctggttccgctctctgactcctggtacgtcagccagctgcagacgatggtggcaacactgaaaatacccatggagcggcgtaaccgtcgcacaggaaggacagagaaagcgcggatctgggaagtgacggacagaacggtcaggacctggattggggaggcggttgccgccgctgctgctgacggtgtgacgttctctgttccggtcacaccacatacgttccgccattcctatgcgatgcacatgctgtatgccggtataccgctgaaagttctgcaaagcctgatgggacataagtccatcagttcaacggaagtctacacgaaggtttttgcgctggatgtggctgcccggcaccgggtgcagtttgcgatgccggagtctgatgcggttgcgatgctgaaacaattatcctgagaataaatgccttggcctttatatggaaatgtggaactgagtggatatgctgtttttgtctgttaaacagagaagctggctgttatccactgagaagcgaacgaaacagtcgggaaaatctcccattatcgtagagatccgcattattaatctcaggagcctgtgtagcgtttataggaagtagtgttctgtcatgatgcctgcaagcggtaacgaaaacgatttgaatatgccttcaggaacaatagaaatcttcgtgcggtgttacgttgaagtggagcggattatgtcagcaatggacagaacaacctaatgaacacagaaccatgatgtggtctgtccttttacagccagtagtgctcgccgcagtcgagcgacagggcgaagccctcgagtgagcgaggaagcaccagggaacagcacttatatattctgcttacacacgatgcctgaaaaaacttcccttggggttatccacttatccacggggatatttttataattattttttttatagtttttagatcttcttttttagagcgccttgtaggcctttatccatgctggttctagagaaggtgttgtgacaaattgccctttcagtgtgacaaatcaccctcaaatgacagtcctgtctgtgacaaattgcccttaaccctgtgacaaattgccctcagaagaagctgttttttcacaaagttatccctgcttattgactcttttttatttagtgtgacaatctaaaaacttgtcacacttcacatggatctgtcatggcggaaacagcggttatcaatcacaagaaacgtaaaaatagcccgcgaatcgtccagtcaaacgacctcactgaggcggcatatagtctctcccgggatcaaaaacgtatgctgtatctgttcgttgaccagatcagaaaatctgatggcaccctacaggaacatgacggtatctgcgagatccatgttgctaaatatgctgaaatattcggattgacctctgcggaagccagtaaggatatacggcaggcattgaagagtttcgcggggaaggaagtggttttttatcgccctgaagaggatgccggcgatgaaaaaggctatgaatcttttccttggtttatcaaacgtgcgcacagtccatccagagggctttacagtgtacatatcaacccatatctcattcccttctttatcgggttacagaaccggtttacgcagtttcggcttagtgaaacaaaagaaatcaccaatccgtatgccatgcgtttatacgaatccctgtgtcagtatcgtaagccggatggctcaggcatcgtctctctgaaaatcgactggatcatagagcgttaccagctgcctcaaagttaccagcgtatgcctgacttccgccgccgcttcctgcaggtctgtgttaatgagatcaacagcagaactccaatgcgcctctcatacattgagaaaaagaaaggccgccagacgactcatatcgtattttccttccgcgatatcacttccatgacgacaggatagtctgagggttatctgtcacagatttgagggtggttcgtcacatttgttctgacctactgagggtaatttgtcacagttttgctgtttccttcagcctgcatggattttctcatactttttgaactgtaatttttaaggaagccaaatttgagggcagtttgtcacagttgatttccttctctttcccttcgtcatgtgacctgatatcgggggttagttcgtcatcattgatgagggttgattatcacagtttattactctgaattggctatccgcgtgtgtacctctacctggagtttttcccacggtggatatttcttcttgcgctgagcgtaagagctatctgacagaacagttcttctttgcttcctcgccagttcgctcgctatgctcggttacacggctgcggcgagcgctagtgataataagtgactgaggtatgtgctcttcttatctccttttgtagtgttgctcttattttaaacaactttgcggttttttgatgactttgcgattttgttgttgctttgcagtaaattgcaagatttaataaaaaaacgcaaagcaatgattaaaggatgttcagaatgaaactcatggaaacacttaaccagtgcataaacgctggtcatgaaatgacgaaggctatcgccattgcacagtttaatgatgacagcccggaagcgaggaaaataacccggcgctggagaataggtgaagcagcggatttagttggggtttcttctcaggctatcagagatgccgagaaagcagggcgactaccgcacccggatatggaaattcgaggacgggttgagcaacgtgttggttatacaattgaacaaattaatcatatgcgtgatgtgtttggtacgcgattgcgacgtgctgaagacgtatttccaccggtgatcggggttgctgcccataaaggtggcgtttacaaaacctcagtttctgttcatcttgctcaggatctggctctgaaggggctacgtgttttgctcgtggaaggtaacgacccccagggaacagcctcaatgtatcacggatgggtaccagatcttcatattcatgcagaagacactctcctgcctttctatcttggggaaaaggacgatgtcacttatgcaataaagcccacttgctggccggggcttgacattattccttcctgtctggctctgcaccgtattgaaactgagttaatgggcaaatttgatgaaggtaaactgcccaccgatccacacctgatgctccgactggccattgaaactgttgctcatgactatgatgtcatagttattgacagcgcgcctaacctgggtatcggcacgattaatgtcgtatgtgctgctgatgtgctgattgttcccacgcctgctgagttgtttgactacacctccgcactgcagtttttcgatatgcttcgtgatctgctcaagaacgttgatcttaaagggttcgagcctgatgtacgtattttgcttaccaaatacagcaatagtaatggctctcagtccccgtggatggaggagcaaattcgggatgcctggggaagcatggttctaaaaaatgttgtacgtgaaacggatgaagttggtaaaggtcagatccggatgagaactgtttttgaacaggccattgatcaacgctcttcaactggtgcctggagaaatgctctttctatttgggaacctgtctgcaatgaaattttcgatcgtctgattaaaccacgctgggagattagataatgaagcgtgcgcctgttattccaaaacatacgctcaatactcaaccggttgaagatacttcgttatcgacaccagctgccccgatggtggattcgttaattgcgcgcgtaggagtaatggctcgcggtaatgccattactttgcctgtatgtggtcgggatgtgaagtttactcttgaagtgctccggggtgatagtgttgagaagacctctcgggtatggtcaggtaatgaacgtgaccaggagctgcttactgaggacgcactggatgatctcatcccttcttttctactgactggtcaacagacaccggcgttcggtcgaagagtatctggtgtcatagaaattgccgatgggagtcgccgtcgtaaagctgctgcacttaccgaaagtgattatcgtgttctggttggcgagctggatgatgagcagatggctgcattatccagattgggtaacgattatcgcccaacaagtgcttatgaacgtggtcagcgttatgcaagccgattgcagaatgaatttgctggaaatatttctgcgctggctgatgcggaaaatatttcacgtaagattattacccgctgtatcaacaccgccaaattgcctaaatcagttgttgctcttttttctcaccccggtgaactatctgcccggtcaggtgatgcacttcaaaaagcctttacagataaagaggaattacttaagcagcaggcatctaaccttcatgagcagaaaaaagctggggtgatatttgaagctgaagaagttatcactcttttaacttctgtgcttaaaacgtcatctgcatcaagaactagtttaagctcacgacatcagtttgctcctggagcgacagtattgtataagggcgataaaatggtgcttaacctggacaggtctcgtgttccaactgagtgtatagagaaaattgaggccattcttaaggaacttgaaaagccagcaccctgatgcgaccacgttttagtctacgtttatctgtctttacttaatgtcctttgttacaggccagaaagcataactggcctgaatattctctctgggcccactgttccacttgtatcgtcggtctgataatcagactgggaccacggtcccactcgtatcgtcggtctgattattagtctgggaccacggtcccactcgtatcgtcggtctgattattagtctgggaccacggtcccactcgtatcgtcggtctgataatcagactgggaccacggtcccactcgtatcgtcggtctgattattagtctgggaccatggtcccactcgtatcgtcggtctgattattagtctgggaccacggtcccactcgtatcgtcggtctgattattagtctgggaccacggtcccactcgtatcgtcggtctgattattagtctgggaccacggtcccactcgtatcgtcggtctgattattagtctgggaccacgatcccactcgtgttgtcggtctgattatcggtctgggaccacggtcccacttgtattgtcgatcagactatcagcgtgagactacgattccatcaatgcctgtcaagggcaagtattgacatgtcgtcgtaacctgtagaacggagtaacctcggtgtgcggttgtatgcctgctgtggattgctgctgtgtcctgcttatccacaacattttgcgcacggttatgtggacaaaatacctggttacccaggccgtgccggcacgttaaccgggctgcatccgatgcaagtgtgtcgctgtcgacggcctcctcacccggtcacgtttcgtcgtttctcctccacgcgctgcggcttcggggccgcacctgcattcgtatgcggtcgcccggttacaggtgcggcacggcctgatggaggccgcatgtgagaggagaattcccatgccaaactggtgctcgaatcgtatgtatttttctggtgaaccggcacagatcgctgagattaaacgactggccagcggtgcagtcacaccgctttatcgccgcgccacaaatgaaggtattcagctgtttctggccggaagtgccggacttctgcagaccactgaagatgtgcggtttgaaccatgccccggactgacggctgctgggcgtggcgttgtatcgccggagaatatcgcgttcacccgctggctgacacacctgcaggacggtgtacttctggatgagcaaaactgcctgatgctgcatgaactctggctgcagagcggtactggccggcgtcgctgggaagaattaccggatgatgccagggaaagcattaccgctcttttcaccccaaaaagaggtgactggtgcgacatctggagtaacgaggatgtatcggtgtggtggaaccgtctgtgtgacaacgtcctgccggaaaaaccatgccgtttgacctgctgacggttctgttcactcgcctggatgttgaagtgaatggctttaacggtggtgttctgaacggtgttccttctgcatatcactggtatacggaacagtatggcgtgaaggggccttgtgggtatgaggtgaatatcagcagtcagggagacaacttcattcaggttgatttcgacacgccgtggtgtcagccggaaagcgacgttattgcagtattaagccgccgtttcagttgcacgctggagcactggtacgccgagcagggctgcaatttctgtggctggcagcgatatgagcgtggagagcttgttgatgtgctgtggggggaactggaatggtcttccccgacagatgatgatgagctgccggaagtcaccgcgccggagtggatagtcgacaaggtggcgcattacggtggatgaagtatgacggagactggcgggcaaccgcccgtttcttttccggtaaaggatgtcgccgggctcctctttttactgcgccggctgacgcggcgcggcaggaacgctgcctgtggtcagtgtcccgcgtccggctgggcacgggacgggcgcttttaccgctcccggctggcatcggtgacagtgtacgccagcccgtcgcccttttctgatgaacgcccttcaagccgctttcgcggcatattctcgccgtcaaaaagacgacggctgcgatattccacggtcggcctgacccgttaccggacgcggtgaacagcccacaggccgcggggaacgggcgccacaggggcgccctcccggtgccctctgtaagagaaggagtgctgttatgtcccgttttatccagggtgactgcgtgcgtgttatggccacgtttccgggcaatgctgtcgatttcatcctcaccgacccgccatatctcgtcggtttccgtgaccgtcaggggcgtaccatcgccggcgataaaaccgatgaatggctgcaaccggcctgtaatgaaatgtaccgcgtgctgaaaaaagatgcgctgatggtgagcttctatggctggaaccgcgtcgatcgctttatggccgcctggaaaaatgcgggattcagcgtggttggccacctggtgtttaccaaaacctacacatcgaaggccgcatatgtgggctatcgccacgaatgcgcttacatcctggcaaaagggcgtccggcgctgcctcagaagccattgcccgacgtgctgggctggaaatattcaggcaatcgtcatcacccgacggaaaagcctgttaccagcctgcaaccactgattgagagcttcacacacccgaacgcgattgtgctggacccgtttgcaggcagcggctcaacctgtgtggccgcccttcagtccggacgccggtatatcggtatcgagctgcttgaacagtatcaccgtgccggacagcaacgtctggctgccgtacagcgggccatgcagcagggggctgcaaatgatgactggtttatgccggaggctgcgtaaatgaactatgccggacataaaaaacttcgcgccgacgtggcggaggtggccaacaccatgtgtgaccttcgggccaggctgaacgatatggagcatcgctgtcgctttgattccgatgtgcttgttgaacgcctggcacgccagacgctgtatcgcgccaatcgcctgttcatggaggcgtataccgaaattctggaactggatgcgtgctttaaagattgagaaggagacgagaatgtacggaacatgcgaaacgctatgccgggagctggcagcaaagtatccgggatatacaccgctgatgctggttatctggtccccggaagagattcaggccctcgctgacggaatggatatttccctgtccgatcctgaaatcaggaccgtcctggcgcgcctggaggacatcccggaagaccagcgaattgagtccggtatttcttctgccgcggcgatggagattatcagcaacgtgagcgaaaaccgccaggtgaccgtcccggctgaactgctggcgtccctgattcagaccgccgaacaggcactgtggaaacgtgaatgggccgcccgtgattacggcctcgccgtcccggaatgcgttacccgccgtcaggcggtggttaatcaggcccgcatcctgctgaaaaacaacacacacgaaaacggctgatgttatcgccgcctgcgggcggcgatacagggagaacgattaatcatgaacgaaaacacaacgctgaacgcactgatttgtcgtcacgcccgtaacctgctgctggcgcagggctggccggaagagacggatgtcgaccagcgtaacccgaagtatccgggctggatcagcatttatgttctgctggatgcgccccggctggcgacgttactcgttaaccgccacggcggcgtactgccgccgcacctggcctccgccattcagaaactgaccggaaccggagcggaacttgttctgtccggcagtcagtggcagtcgctgccggtgcttccggcagacggaacgcaggtgtcttttccgtatgccggtgaatggctgaccgaagacgaaatcagggctgtacttgcggcggtgcgcgatgcggtacgcagtgtcagttgccgggtggcagaagatatgcggcgtatccgggcggcgctgaccaccaccggtcagacgttactgacccgccagactcgccgctttcgcctggtcgtgaaggaaagcgatcacccctgctggctcgatgaggacgacgaaaacctgcccgtggtgctcgatgccatcctgaaccggggcgcacgtttttcggcggtggaaatgtatctggtcagcgattgtattgaacatatcctgtctagtgggctggcctgcgatgtgctgcgtataccggatgaaccgccccgccagtggtttgaccgtggtgttctgcgggaagttgtccgggaagcccgggccgaaatccgcagcatggcggatgccctggcaaaaatcaggggctgatgatggcggggaaaatccccgctttttttctgccggtccccggacagagcacaaaggaagtcgccgccggctccgctttacccggccatgcaggcatggccttgtgggttttcagttatgtggccgccgtgtcgtgtgcgggcggtgccgtgcctccatcttagccgggctggcggggatgcaagggtacgcttcgccgctgcggtcacccggtccctccttcccgtctgccgtgattttccggtcgttcacccgctcaggtttcgcggtctcaccctccaactcccgtcagccgtgtgcgtcaggctgcggcttcccttgcgccctgtgcatccccgccttatcgcccggcttttatggaggcacggcaccgcccggtgtcgcggaatatgtgaataacggaggaaaacatcatgcaatatgcgaaacctgtcactctgaacgttgaagagtgcgaccgtctctcctttctgccttacctgtttggcaacgattttctgtatgccgaggcgtatgtgtacgcgctggcgcaaaaaatgatgccggaatatcagggaggcttctggcacttcatccgcctgccggacggtggcggttacatgatgccggatggcgaccgttttcatctggtcaacggtgaaaactggtttgaccgcacggtcagcgccgatgccgcaggcatcattctgacttcccttgtgattaaccgccagttgtggctgtaccacgacagcggggatgtaggactgacccagctttaccggatgcgcgatgcgcagttgtggcgtcacatcgaatttcaccccgaatgcaacgcgatttacgcggcactggactgattaacggacggggcggcaatgccgcccctgtaaaggagacgagaacatgtactgtactgttaaagaaatcatccgcgatgtactggatacagacgtgccggacagtgaatgcgtttttgccgtggtgctgacccgtggggatgtgcgccacatagcccaggactggaacctgtcagacgatgagctggaaaccgtcatgcagcggctggacgatgcctttgaatatggtgcggatgtcagcattgttcacgacgttgttcgtgagctgatggaagaaaagcgtgccagccgtcaggtgacagttccggcggtgatgctggaaaaagtgatggcgctggcaggcagtgaaatgaagcgcctgtatgccgtcgggagtgagaacgggggcgacggtgatgcgttcgtcagggaggaacgcgaagcaatggacgttgtgttacaggcgctggacggggagcacatgtcatgaatatcagcacagaaacccgcgaaattctgcgcaattacaaagccgtgattaatgcgcgacgtcgtgaaatggggcagaaaccgctcaccaccgcgcagattgttgatgaaatctgcgattttgtggcgaatcagcaggctgttttcctgggcggtcactacatcttacagggcagcagaaacaggtgatacagggcaggcggtggaggccgcctgtcagcccgcgcgaaaacccctggcaggctgacgcctgccggaagggaagcgggccacgctgacgcgtcgcccgttacccttcctgtttgtgatgtgtccggaatgtttttttctgatgttatttttctgtggttaccgtgcctgttactgttcttcttctttttcctcttcctcttcttcctcttcttcctcttctttccgttcctctcctgcttatggcttttccgggcgtccccctggtggggcgggctgtcgtgaacggagccagcgaagctgtctccgccctggcgggcttccatccctgacgcgaaaccctggcttgcagcgaccgttccggtcgcgccgcctctgtcgcgccgtggcctgcgctcccggcatcccggcaaaaggccgccgggatgtaaggggcaacgccgtttcgcaaaccgcgcttcacgtcgttgcggcgggtccctgctcattgcctgccgggtgccacacacccgtatgagtccctgtcgccggggctgatacagccacaacctgccgcactgactgtccagggtaaatgaacagcccacaaaattttttacccaaaacccggtaaaaaattttgcgttctgcccaggacaggtgtgtcaggccgtggcagtgatgccccttgcggcgaaggttctcaaaaaggtgatggtgaataccggagggaacaaaaggcaggtccccgcaaaacgtcaaaaccgcggctcccgaaactcaaaagatgatgggggctgaaaacatcaacagaaggagacacatcatggcagttcgtggcattaacaaggtcatcctcgtaggacgcctgggaaaggatccggaagtccgttacatccccaacgggggcgcagtggcaaacctgcaggtggccacgtcagaaagctggcgtgacaaacagacgggggagatgcgggagcagacagaatggcatcgcgtggtgctgttcggcaagctcgcggaagtggcaggtgaatgtctgcgcaagggcgcgcaggtctacatcgaaggtcagcttcgcacccgtagctgggaggataacggtatcacccgttacgtcaccgaaattcttgttaagaccacgggcaccatgcagatgctggtacgtgccgcaggtgctcagactcagccggaagaggggcaacagttcagcggtcagcctcagccggaaccacaggcggaggccggtacgaaaaaaggtggcgcaaaaacgaaaggccgtggacgtaaggccgcgcagccggagcctcagccgcaaccgccggagggtgacgattacgggttttcag

SEQ ID NO: 5620 - DNA, 7134 bp, Artificial Sequence
  Description of Artificial Sequence: Synthetic polynucleotide
ggcaccatgcatcgatcccgcgaaattaatacgactcactatagggagaccacaacggtttccctctagaaataattttgtttaactttaagaaggagatatagatcatgacctctcccctcccaacgcctacgtggcaggagcttcgccagttcatcgaatccttcatccaggagcgcctccagggcaagctggacaaactccaacccgacgaagacgacaagcgccagacattgctggccacccaccggcgggaggcctggctggccgatgccgcccggcgggttggccagttgcagttggtgacccacacgctcaagccgatccatcccgacgcccgcggcagcaacctgcacagcctgccgcaagcacccggccaaccgggcctcgccggttcccatgagctaggtgacaggctggtcagcgatgtggtgggcaatgccgcggcgctggacgtattcaagtttctcagtctccagtatcagggtaaaaatcttctgaactggctgacagaagacagtgccgaggcattacaggcgctgtccgataacgccgaacaggctcgcgaatggcggcaagcgttcatcggcatcacgaccgtcaaaggcgctcccgcgtcccacagcctggccaagcagttgtactttcccctgcccggttccggctaccacctgctagcaccgctgtttcccaccagtctggtgcatcacgtccacgctctgctccgcgaagcgcgcttcggcgacgcggccaaggcggcacgcgaagcgcgcagccgccaggagtcatggccccacggattcagcgagtaccccaacctggcgatccagaagttcggcggtaccaagccgcagaacatcagtcagttgaacaacgagcgccgtggcgagaactggttgctgccatcgcttccgccgaactggcaaaggcagaatgtaaacgcgccgatgcggcactcttcggtcttcgagcatgacttcggaagaactcctgaagtatcccgcctaacccgtaccctgcagcgttttcttgccaagacagtccataacaacctcgccatccgccagcggcgtgcccaattggtggcgcaaatctgcgacgaagccctgcaatacgccgcccgtctgcgcgaactggagcccggctggagcgcaacccccgggtgccaactgcatgacgcggagcagctctggctcgatccgttgcgcgcacagaccgatgagacgttcttgcagcgccgactacgaggtgactggcctgccgaggtcggaaatcgcttcgccaactggctgaaccgggcggtcagcagcgacagtcagatactgggtagcccggaagccgcccaatggagccaggagctgagcaaggaactgacgatgttcaaggagatactcgaagatgagcgtgactgataataagatcccaactccataaggatccgggccctgtacaagatcctgtaaaacgacggccagtgaattcactcgagttctagaaataattttgtttaactttaagaaggagatatagatcatgagcgtgactgatcccgaggcgctgctgttgctgccacgcctgtccatccagaacgccaacgccatttccagccccttgacctggggtttcccttcgcccggcgctttcaccggattcgtccatgccttgcagcgtcgagtcggaatctccctcgatatcgaactggacggtgtcggcatcgtctgtcaccgcttcgaagcgcagatatcgcaaccggccggcaagcgcaccaaggtcttcaacctgacccgcaatccgctgaaccgcgacggctccaccgcagccatcgtcgaagaaggtcgcgcccatctggaggtcagtctgctgctcggagtgcatggcgatggtctggacgatcaccccgcacaggaaatcgccaggcaggtacaggagcaggctggcgccatgcgcctcgccggtggcagcatcctgccctggtgcaatgagcgcttcccggctccgaacgccgaactgctgatgctgggtggcagcgacgaacagcggcgcaagaaccagcgccggcttacccgccgcctgctccccggcttcgccctggtgagtcgcgaggcgttgttgcaacaacatctggaaaccttgcgcaccacgctccccgaagccaccacgctcgatgcactgctcgatctttgtcgaatcaacttcgagcctcctgcaacctcgtccgaagaagaagcatcgccgcccgatgcagcctggcaagtgcgcgacaagcccggctggctggtgccgatcccggctggctacaacgccctgtcacccctgtacctccccggcgaagtgcgaaatgcccgtgatagagaaacaccgctgcgcttcgtcgaaaacctcttcggtctgggcgaatggctcagcccccatcgcgtcgccgcgttatcggacctgctttggtatcaccacgccgagcctgacaaagggctctaccgctggagcacaccccgtttcgtcgaacacgccatcgcataataataagatcccaactccataaggatccgcgatcgcagcggataacaatttcacatcctgcaggactcgagttctagaaataattttgtttaactttaagaaggagatatacatatgaaatcttctcaccatcaccatcaccatgaaaacctgtacttccaatccaatgcatccaagccaatactgagcaccgcttccgtcctcgccttcgaacgtaagctcgacccttccgacgcccttatgagcgctggcgcctgggcgcaacgcgacgcctcgcaggaatggccggccgtgaccgtgcgcgagaagtccgtacgcggcaccatctccaaccgcctcaagaccaaggaccgtgacccggccaagctggacgcctcgatccagtcgcccaacctgcagacggtggacgtggccaacctgccgagcgacgccgacaccctcaaggtccgcttcaccctccgtgtgctcggcggcgccggaacaccgtctgcctgcaacgacgcggcctaccgtgacaagctgctgcaaacggtcgccacctacgtgaacgatcagggcttcgccgagctggctcgtcgttatgcgcacaacctggccaacgcccgcttcctgtggcgcaaccgggtgggcgcggaagcggtggaagtccgtatcaaccatatccgccagggcgaggtggctcgcgcctggcgcttcgacgccctggccatcggcttgcgcgacttcaaggccgacgccgaactggacgcgctcgccgaactgatcgccagcggtctctcaggcagtgggcatgtcctgctcgaagtggtcgccttcgcccgtatcggcgacggccaggaagtcttcccctcccaggaactgatcctcgacaaaggcgacaagaaaggccagaagagcaagaccctgtacagcgtacgcgatgccgcggccatccactcgcagaagatcggcaatgccctgcgcaccatcgatacgtggtatcccgacgaagatggcctcggccccatcgccgtggagccctacggctccgtcacatcccagggcaaagcctatcgccagcccaagcagaagctggacttctatacgctgctcgacaactgggtactgcgcgacgaggcgcccgccgtggagcaacagcattatgtgatcgccaacctgatccgtggcggcgtgttcggtgaagccgaagagaagtaataataacattggaagtggataacggatccgcgatcgcggcgcgcccgccagggttttcccagtcgcggccgccctgcaggactcgagttctagaaataattttgtttaactttaagaaggagatatagatcatggaccactacctcgacattcgcttgcgaccggacccggaatttcccccggcgcaactcatgagcgtgctcttcggcaagctccaccaggccctggtggcacagggcggggacaggatcggcgtgagcttccccgacctcgacgaaagccgctcccggctgggcgagcgcctgcgcattcatgcctcggcggacgaccttcgtgccctgctcgcccggccctggctggaagggttgcgggaccatctgcaattcggagaaccggcagtcgtgcctcaccccacaccgtaccgtcaggtcagtcgggttcaggcgaaaagcaatccggaacgcctgcggcggcggctcatgcgccggcacgatctgagtgaggaggaggctcggaaacgcattcccgatacggtcgcgagagccttggacctgcccttcgtcacgctacgcagccagagcaccggacagcacttccgtctcttcatccgccacgggccgttgcaggtgacggcagaggaaggaggattcacctgttacgggttgagcaaaggaggtttcgttccctggttctgataataagatcccaactccataaggatccgcgatcgcggcgcgccacctggtgccatcgccctgatagacgttaattaaagtactggccggccacgcgtctcgagagatccggctgctaacaaagcccgaaaggaagctgagttggctgctgccaccgctgagcaataactagcataaccccttggggcctctaaacgggtcttgaggggttttttgctgaaaggaggaactatatccgactagtagcccgcctaatgagcgggcttttttttaattcccctatttgtttatttttctaaatacattcaaatatgtatccgctcatgagacaataaccctgataaatgcttcaataatattgaaaaaggaagagtatgagtattcaacatttccgtgtcgcccttattcccttttttgcggcattttgccttcctgtttttgctcacccagaaacgctcgtgaaagtaaaagacgcagaggaccaattgggggcacgagtgggatacatagaactggacttgaatagcggtaaaatccttgagagttttcgccctgaagagcgttttccaatgatgagcactttcaaagttctgctatgtggagcagtattatcccgtgtagatgcggggcaagagcaactcggacgacgaatacactattcgcagaatgacttggttgaatactccccagtgacagaaaagcaccttacggacggaatgacggtaagagaattatgtagtgccgccataacgatgagtgataacactgcggcgaacttacttctgacaaccatcggtggaccgaaggaattaaccgcttttttgcacaatatgggagaccatgtaactcgccttgaccgttgggaaccagaactgaatgaagccataccaaacgacgagcgagacaccacaatgcctgcggcaatggcaacaacattacgcaaactattaactggcgaactacttactctggcttcacggcaacaattaatagactggcttgaagcggataaagttgcaggaccactactgcgttcggcacttcctgctggctggtttattgctgataaatctggggcaggagagcgtggttcacggggtatcattgccgcacttggaccagatggtaagccttcccgtatcgtagttatctacacgacgggtagtcaggcaactatggacgaacgaaatagacagattgctgaaataggggcttcactgattaagcattggtaaaccgatacaattaaaggctccttttggagcctttttttttggacggaccggtagaaaagatcaaaggatcttcttgagatcctttttttctgcgcgtaatctgctgcttgcaaacaaaaaaaccaccgctaccagcggtggtttgtttgccggatcaagagctaccaactctttttccgaaggtaactggcttcagcagagcgcagataccaaatactgtccttctagtgtagccgtagttaggccaccacttcaagaactctgtagcaccgcctacatacctcgctctgctaatcctgttaccagtggctgctgccagtggcgataagtcgtgtcttaccgggttggactcaagacgatagttaccggataaggcgcagcggtcgggctgaacggggggttcgtgcacacagcccagcttggagcgaacgacctacaccgaactgagatacctacagcgtgagctatgagaaagcgccacgcttcccgaagggagaaaggcggacaggtatccggtaagcggcagggtcggaacaggagagcgcacgagggagcttccagggggaaacgcctggtatctttatagtcctgtcgggtttcgccacctctgacttgagcgtcgatttttgtgatgctcgtcaggggggcggagcctatggaaaaacgccagcaacgcggcctttttacggttcctggccttttgctggccttttgctcacatgttctttcctgcgttatcccctgattctgtggataaccgtattaccgcctttgagtgagctgataccgctcgccgcagccgaacgaccgagcgcagcgagtcagtgagcgaggaagcggaagagcgcctgatgcggtattttctccttacgcatctgtgcggtatttcacaccgcaatggtgcactctcagtacaatctgctctgatgccgcatagttaagccagtatacactccgctatcgctacgtgactgggtcatggctgcgccccgacacccgccaacacccgctgacgcgccctgacgggcttgtctgctcccggcatccgcttacagacaagctgtgaccgtctccgggagctgcatgtgtcagaggttttcaccgtcatcaccgaaacgcgcgaggcagctgcggtaaagctcatcagcgtggtcgtgaagcgattcacagatgtctgcctgttcatccgcgtccagctcgttgagtttctccagaagcgttaatgtctggcttctgataaagcgggccatgttaagggcggttttttcctgtttggtcactgatgcctccgtgtaagggggatttctgttcatggggtaatgataccgatgaaacgagagaggatgctcacgatacgggttactgatgatgaacatgcccggttactggaacgttgtgagggtaaacaactggcggtatggatgcggcgggaccagagaaaaatcactcagggtcaatgccagcgcttcgttaatacagatgtaggtgtt

SEQ ID NO: 5621 - DNA, 7257 bp, Artificial Sequence
  Description of Artificial Sequence: Synthetic polynucleotide
ggcaccatgcatcgatcccgcgaaattaatacgactcactatagggagaccacaacggtttccctctagaaataattttgtttaactttaagaaggagatatacatatgaaatcttcttggagccacccgcagttcgaaaaggaaaacctgtacttccaatccaatgcagacgacatttctcccagcgaactgaagacgatccttcactccaagcgtgccaacctgtactacctgcaacactgccgggtactggtcaacggcgggcgggtcgagtacgtcaccgacgaaggccggcattcgcactactggaacatccccatcgccaacaccaccagcctgttgctgggcaccggtacctccattacccaggcagccatgcgcgaactggccagggccggggtattggtaggcttctgcggcggcggcggaacgccgctgttcagcgccaacgaagtggacgtcgaggtgtcctggctgacgccgcagagcgaataccgccccaccgaatacctgcagcgctgggtcggcttctggttcgatgaggaaaaacgcctggtggccgcccggcacttccagcgagccaggctggagcggattcgccacagttggctggaagaccgcgtattgcgcgacgccggcttcgccgtcgatgccaccgcactggcagttgccgtggaagattccgcccgagcgttggagcaggctcccaatcatgagcatctactgaccgaagaagcgcgcctgagcaagcgcctgttcaagctcgcagcccaggccacccgctacggcgagttcgtccgcgccaagcgcggcagcggcggcgacccggccaaccgcttcctcgaccatggcaactacctggcctacggcctcgcggcgaccgccacctgggtgctgggcattccccatggactggcggtgctacacggcaagacccggcgcggaggcctggtgttcgatgtggcggacctgatcaaggactcgctgatcctgccgcaggcatttctttccgccatgcgcggcgacgaggaacaggacttccgccaggcctgcctggacaacctgagccgcgcacaggccctggacttcatgatcgacacgctgaaagacgtggcgcagcggagcacggtgtccgcatgataataacattggaagtggataacggatccgggccctgtacaagatcctgtaaaacgacggccagtgaattcactcgagtcccggggcgatcgcagcggataacaatttcacatcctgcaggactcgagttctagaaataattttgtttaactttaagaaggagatatagatcatgaacatcctgctggtgtcgcaatgcgaaaagcgcgccctgagcgaaacccgccgcattctcgaccagttcgccgagcgccgcggcgaacggacctggcaaacgcccatcactcaagccggactggataccctgcgacgcctgctgaagaaaagcgcacggcgcaacaccgccgtagcctgtcactggatccgcggccgcgaccacagcgaactgctgtggatcgtcggtgatgccagccgcttcaacgcccagggtgcggtgccgaccaacaggacctgccgcgacatcctgcgcaaggaagacgagaacgactggcacagcgccgaggacatccgcctgctgacggtgatggcagcgctgttccacgatatcggcaaggccagccaggccttccaggccaaactgcggaaccgcggcaaaccgatggccgatgcctatcgtcacgaatgggtatcactgcgcctgttcgaagccttcgttggcccaggcagcagcgacgaggactggctgaggcgcctggcggacaagcgagagacgggcgatgcctggctgtcgcaactggccagggacgaccggcaatccgcgccacccggcccgttccagaaaagccggctaccgccgctcgcccaggcggtcggctggttgatcgtcagccatcatcgcctgcccaacggggaccatcgcggcagcgcctcgctggcacgcttgccggcccccatccagagccaatggtgcggcgcacgcgacgcagacgcaaaagaaaaggccgcctgctggcagttcccccacggcctgcccttcgccagcgcccattggcgcgccaggacagcgctatgcgcgcagagcatgctcgagcgtcccggcctgctggctcggggaccggccttgttgcatgattcctacgtcatgcatgtgtcccgactgatcctgatgctcgcggaccaccactattccagtctccctgccgactcccggctgggcgacccgaacttccccttgcacgccaacaccgaccgggacagcggcaaactaaagcagcgcctggacgaacacctgctcggcgtcgccctgcacagtcgcaagctcgccggcaccctgccacgcctggagcgacaactaccgcgccttgcccggcacaagggcttcacccgccgggtcgagcagccgcgcttccgctggcaggacaaggcctacgactgcgcgatggcctgccgcgagcaggctatggagcatggattcttcggcctcaacctggcgtcgaccggttgcggtaagaccctcgccaacggccgtatcctgtatgcgctggccgatccgcaacgcggcgcgcgtttcagcatcgctctcggcctgcgcagcttgaccctgcaaaccgggcaggcctaccgcgagcggctcggcctgggcgacgacgacctcgctatcctggtcggcggcagcgccgcccgcgaactgttcgaaaagcagcaggagcgcctggagcgcagcggtagcgagtcagcccaggagctgctggcggaaaacagccatgtacacttcgccggcacgctcgaggacggccctctacgcgagtggctcggcaggaacagcgcgggaaaccgcctactccaggcgcccatcctggcctgcaccatcgaccacctgatgcccgccagcgaaagcctgcgcggcggacaccagatagcgccactgctccgcctgatgacttccgacctggtgctcgacgaggtcgacgacttcgatatcgacgacctgcccgccctgtcgcggctggtgcactgggccggcctgttcggcagccgcgtgctgctctcctccgcgaccctgccgccggccttggtgcagggcctgttcgaggcctatcgcagcggccgggaaatcttccagcgccatcgtggcgctcccggacgcgctacggaaatccgctgtgcctggttcgacgagttctccagccaatccagcgcccacggcgccgtaacctccttcagcgaagcgcatgcgaccttcgtcgcccagcgtctggcgaagctcgagcaactgccgccacgtcgccaggcgcagctatgcaccgtgcatgccgctggcgaggcccgtcccgcgctgtgccgcgagttggccgggcagatgaatacctggatggctgacctgcatcgctgccatcacaccgaacaccaaggacgtcgcatcagtttcggcctgctacggctggccaacatcgaacccctgatcgaactggcccaggccatcctcgcccagggtgcgcccgaggggttgcatgtccatctgtgtgtctaccattcgcggcatccccttctggtccgctcggccatcgagcgacaactcgatgaactgctgaagcgttcggacgacgacgccgccgcgctgttcgctcgtccgacgctggccaaggcgctccaggccagcacggagcgggatcatctgttcgtcgtactcgcctcgccggtggcggaggtcggtcgcgaccacgattacgactgggccatcgtcgaaccctcctccatgcgctcgatcatccagttggccgggcgaatccgccgccatcgctccggcttcagcggcgaggccaacctatacctgctatcgcgcaatatccgctcgctggaagggcagaatccggcgttccagcggcccggcttcgagacccccgacttccctcttgacagccacgacctgcacgacctgctcgaccccgccctactcgcccgcatcgacgccagcccacgaatcgtcgaaccgttcccactgttcccacgcagccggttggtcgacctggaacaccgacgcctgcgcgcgctgatgcttgccgacgacccaccgtcgtccctgctcggcgtaccgctctggtggcaaaccccggcatcgctcagcggcgccctgcaaaccagccaaccatttcgcgcaggcgccaaggagcgatgctacgccctgctgccggacgaggacgacgaggagcgcttgcatttcagccgctacgaagaagggacctggagcaaccaggacaacctgttgcgcaacctcgacctcacctatggcccgcgcatccagacatggggcacggtcaactatcgggaggagctagtcgcaatggccggccgcgaggacctcgacctgcgtcaatgcgccatgcgctacggcgaggtgagattgcgagaaaacacccagggatggagctaccacccttatttggggttcaagaaatacaactgataataagatcccaactccataaggatccgcgatcgcggcgcgcccgccagggttttcccagtcgcggccgctcgcgcacctggtgccatcgccctgatagacgttaattaaagtactggccggccacgcgtctcgagagatccggctgctaacaaagcccgaaaggaagctgagttggctgctgccaccgctgagcaataactagcataaccccttggggcctctaaacgggtcttgaggggttttttgctgaaaggaggaactatatccgactagtaacgtttacaatttcaggtggcacttttcggggaaatgtgcgcggaacccctatttgtttatttttctaaatacattcaaatatgtatccgctcatgaattaattcttatttgccgactaccttggtgatctcgcctttcacgtagtggacaaattcttccaactgatctgcgcgcgaggccaagcgatcttcttcttgtccaagataagcctgtctagcttcaagtatgacgggctgatactgggccggcaggcgctccattgcccagtcggcagcgacatccttcggcgcgattttgccggttactgcgctgtaccaaatgcgggacaacgtaagcactacatttcgctcatcgccagcccagtcgggcggcgagttccatagcgttaaggtttcatttagcgcctcaaatagatcctgttcaggaaccggatcaaagagttcctccgccgctggacctaccaaggcaacgctatgttctcttgcttttgtcagcaagatagccagatcaatgtcgatcgtggctggctcgaagatacctgcaagaatgtcattgcgctgccattctccaaattgcagttcgcgcttagctggataacgccacggaatgatgtcgtcgtgcacaacaatggtgacttctacagcgcggagaatctcgctctctccaggggaagccgaagtttccaaaaggtcgttgatcaaagctcgccgcgttgtttcatcaagccttacggtcaccgtaaccagcaaatcaatatcactgtgtggcttcaggccgccatccactgcggagccgtacaaatgtacggccagcaacgtcggttcgagatggcgctcgatgacgccaactacctctgatagttgagtcgatacttcggcgatcaccgcttccctcataacaccccttgtattactgtttatgtaagcagacagttttattgttcatgaccaaaatcccttaacgtgagttttcgttccactgagcgtcagaccccgtagaaaagatcaaaggatcttcttgagatcctttttttctgcgcgtaatctgctgcttgcaaacaaaaaaaccaccgctaccagcggtggtttgtttgccggatcaagagctaccaactctttttccgaaggtaactggcttcagcagagcgcagataccaaatactgtccttctagtgtagccgtagttaggccaccacttcaagaactctgtagcaccgcctacatacctcgctctgctaatcctgttaccagtggctgctgccagtggcgataagtcgtgtcttaccgggttggactcaagacgatagttaccggataaggcgcagcggtcgggctgaacggggggttcgtgcacacagcccagcttggagcgaacgacctacaccgaactgagatacctacagcgtgagctatgagaaagcgccacgcttcccgaagggagaaaggcggacaggtatccggtaagcggcagggtcggaacaggagagcgcacgagggagcttccagggggaaacgcctggtatctttatagtcctgtcgggtttcgccacctctgacttgagcgtcgatttttgtgatgctcgtcaggggggcggagcctatggaaaaacgccagcaacgcggcctttttacggttcctggccttttgctggccttttgctcacatgttctttcctgcgttatcccctgattctgtggataaccgtattaccgcctttgagtgagctgataccgctcgccgcagccgaacgaccgagcgcagcgagtcagtgagcgaggaagcggaagagcgcctgatgcggtattttctccttacgcatctgtgcggtatttcacaccgcaatggtgcactctcagtacaatctgctctgatgccgcatagttaagccagtatacactccgctatcgctacgtgactgggtcatggctgcgccccgacacccgccaacacccgctgacgcgccctgacgggcttgtctgctcccggcatccgcttacagacaagctgtgaccgtctccgggagctgcatgtgtcagaggttttcaccgtcatcaccgaaacgcgcgaggcagctgcggtaaagctcatcagcgtggtcgtgaagcgattcacagatgtctgcctgttcatccgcgtccagctcgttgagtttctccagaagcgttaatgtctggcttctgataaagcgggccatgttaagggcggttttttcctgtttggtcactgatgcctccgtgtaagggggatttctgttcatggggtaatgataccgatgaaacgagagaggatgctcacgatacgggttactgatgatgaacatgcccggttactggaacgttgtgagggtaaacaactggcggtatggatgcggcgggaccagagaaaaatcactcagggtcaatgccagcgcttcgttaatacagatgtaggtgtt

SEQ ID NO: 5622 - DNA, 3719 bp, Artificial Sequence
  Description of Artificial Sequence: Synthetic polynucleotide
ggggaattgtgagcggataacaattcccctgtagaaataattttgtttaactttaataaggagatataccatgggcagcagccatcaccatcatcaccacagccaggatccgaattcgagctcggcgcgcctgcaggtcgacaagcttgcggccgcataatgcttaagtcgaacagaaagtaatcgtattgtacacggccgcataatcgaaattaatacgactcactataggggaattgtgagcggataacaattccccatcttagtatattagttaagtataagaaggagatatacatatggcagatctcaattggatatcggccggccacgcgatcgctgacgtcggtaccctcgagtctggtaaagaaaccgctgctgcgaaatttgaacgccagcacatggactcgtctactagcgcagcttaattaacctaggctgctgccaccgctgagcaataactagcataaccccttggggcctctaaacgggtcttgaggggttttttgctgaaacctcaggcatttgagaagcacacggtcacactgcttccggtagtcaataaaccggtaaaccagcaatagacataagcggctatttaacgaccctgccctgaaccgacgacaagctgacgaccgggtctccgcaagtggcacttttcggggaaatgtgcgcggaacccctatttgtttatttttctaaatacattcaaatatgtatccgctcatgaattaattcttagaaaaactcatcgagcatcaaatgaaactgcaatttattcatatcaggattatcaataccatatttttgaaaaagccgtttctgtaatgaaggagaaaactcaccgaggcagttccataggatggcaagatcctggtatcggtctgcgattccgactcgtccaacatcaatacaacctattaatttcccctcgtcaaaaataaggttatcaagtgagaaatcaccatgagtgacgactgaatccggtgagaatggcaaaagtttatgcatttctttccagacttgttcaacaggccagccattacgctcgtcatcaaaatcactcgcatcaaccaaaccgttattcattcgtgattgcgcctgagcgagacgaaatacgcggtcgctgttaaaaggacaattacaaacaggaatcgaatgcaaccggcgcaggaacactgccagcgcatcaacaatattttcacctgaatcaggatattcttctaatacctggaatgctgttttcccggggatcgcagtggtgagtaaccatgcatcatcaggagtacggataaaatgcttgatggtcggaagaggcataaattccgtcagccagtttagtctgaccatctcatctgtaacatcattggcaacgctacctttgccatgtttcagaaacaactctggcgcatcgggcttcccatacaatcgatagattgtcgcacctgattgcccgacattatcgcgagcccatttatacccatataaatcagcatccatgttggaatttaatcgcggcctagagcaagacgtttcccgttgaatatggctcatactcttcctttttcaatattattgaagcatttatcagggttattgtctcatgagcggatacatatttgaatgtatttagaaaaataaacaaataggcatgctagcgcagaaacgtcctagaagatgccaggaggatacttagcagagagacaataaggccggagcgaagccgtttttccataggctccgcccccctgacgaacatcacgaaatctgacgctcaaatcagtggtggcgaaacccgacaggactataaagataccaggcgtttccccctgatggctccctcttgcgctctcctgttcccgtcctgcggcgtccgtgttgtggtggaggctttacccaaatcaccacgtcccgttccgtgtagacagttcgctccaagctgggctgtgtgcaagaaccccccgttcagcccgactgctgcgccttatccggtaactatcatcttgagtccaacccggaaagacacgacaaaacgccactggcagcagccattggtaactgagaattagtggatttagatatcgagagtcttgaagtggtggcctaacagaggctacactgaaaggacagtatttggtatctgcgctccactaaagccagttaccaggttaagcagttccccaactgacttaaccttcgatcaaaccgcctccccaggcggttttttcgtttacagagcaggagattacgacgatcgtaaaaggatctcaagaagatcctttacggattcccgacaccatcactctagatttcagtgcaatttatctcttcaaatgtagcacctgaagtcagccccatacgatataagttgtaattctcatgttagtcatgccccgcgcccaccggaaggagctgactgggttgaaggctctcaagggcatcggtcgagatcccggtgcctaatgagtgagctaacttacattaattgcgttgcgctcactgcccgctttccagtcgggaaacctgtcgtgccagctgcattaatgaatcggccaacgcgcggggagaggcggtttgcgtattgggcgccagggtggtttttcttttcaccagtgagacgggcaacagctgattgcccttcaccgcctggccctgagagagttgcagcaagcggtccacgctggtttgccccagcaggcgaaaatcctgtttgatggtggttaacggcgggatataacatgagctgtcttcggtatcgtcgtatcccactaccgagatgtccgcaccaacgcgcagcccggactcggtaatggcgcgcattgcgcccagcgccatctgatcgttggcaaccagcatcgcagtgggaacgatgccctcattcagcatttgcatggtttgttgaaaaccggacatggcactccagtcgccttcccgttccgctatcggctgaatttgattgcgagtgagatatttatgccagccagccagacgcagacgcgccgagacagaacttaatgggcccgctaacagcgcgatttgctggtgacccaatgcgaccagatgctccacgcccagtcgcgtaccgtcttcatgggagaaaataatactgttgatgggtgtctggtcagagacatcaagaaataacgccggaacattagtgcaggcagcttccacagcaatggcatcctggtcatccagcggatagttaatgatcagcccactgacgcgttgcgcgagaagattgtgcaccgccgctttacaggcttcgacgccgcttcgttctaccatcgacaccaccacgctggcacccagttgatcggcgcgagatttaatcgccgcgacaatttgcgacggcgcgtgcagggccagactggaggtggcaacgccaatcagcaacgactgtttgcccgccagttgttgtgccacgcggttgggaatgtaattcagctccgccatcgccgcttccactttttcccgcgttttcgcagaaacgtggctggcctggttcaccacgcgggaaacggtctgataagagacaccggcatactctgcgacatcgtataacgttactggtttcacattcaccaccctgaattgactctcttccgggcgctatcatgccataccgcgaaaggttttgcgccattcgatggtgtccgggatctcgacgctctcccttatgcgactcctgcattaggaaattaatacgactcactata

SEQ ID NO: 5623 - DNA, 4008 bp, Artificial Sequence
  Description of Artificial Sequence: Synthetic polynucleotide
ggggaattgtgagcggataacaattcccctgtagaaataattttgtttaactttaataaggagatataccatgggcagcagccatcaccatcatcaccacagccaggatccgaattcgagctcggcgcgcctgcaggtcgacaagcttgcggccgcataatgcttaagtcgaacagaaagtaatcgtattgtacacggccgcataatcgaaattaatacgactcactataggggaattgtgagcggataacaattccccatcttagtatattagttaagtataagaaggagatatacatatggcagatctcaattggatatcggccggccacgcgatcgctgacgtcggtaccctcgagtctggtaaagaaaccgctgctgcgaaatttgaacgccagcacatggactcgtctactagcgcagcttaattaacctaggctgctgccaccgctgagcaataactagcataaccccttggggcctctaaacgggtcttgaggggttttttgctgaaacctcaggcatttgagaagcacacggtcacactgcttccggtagtcaataaaccggtaaaccagcaatagacataagcggctatttaacgaccctgccctgaaccgacgaccgggtcgaatttgctttcgaatttctgccattcatccgcttattatcacttattcaggcgtagcaccaggcgtttaagggcaccaataactgccttaaaaaaattacgccccgccctgccactcatcgcagtactgttgtaattcattaagcattctgccgacatggaagccatcacagacggcatgatgaacctgaatcgccagcggcatcagcaccttgtcgccttgcgtataatatttgcccatagtgaaaacgggggcgaagaagttgtccatattggccacgtttaaatcaaaactggtgaaactcacccagggattggctgagacgaaaaacatattctcaataaaccctttagggaaataggccaggttttcaccgtaacacgccacatcttgcgaatatatgtgtagaaactgccggaaatcgtcgtggtattcactccagagcgatgaaaacgtttcagtttgctcatggaaaacggtgtaacaagggtgaacactatcccatatcaccagctcaccgtctttcattgccatacggaactccggatgagcattcatcaggcgggcaagaatgtgaataaaggccggataaaacttgtgcttatttttctttacggtctttaaaaaggccgtaatatccagctgaacggtctggttataggtacattgagcaactgactgaaatgcctcaaaatgttctttacgatgccattgggatatatcaacggtggtatatccagtgatttttttctccattttagcttccttagctcctgaaaatctcgataactcaaaaaatacgcccggtagtgatcttatttcattatggtgaaagttggaacctcttacgtgccgatcaacgtctcattttcgccaaaagttggcccagggcttcccggtatcaacagggacaccaggatttatttattctgcgaagtgatcttccgtcacaggtatttattcggcgcaaagtgcgtcgggtgatgctgccaacttactgatttagtgtatgatggtgtttttgaggtgctccagtggcttctgtttctatcagctgtccctcctgttcagctactgacggggtggtgcgtaacggcaaaagcaccgccggacatcagcgctagcggagtgtatactggcttactatgttggcactgatgagggtgtcagtgaagtgcttcatgtggcaggagaaaaaaggctgcaccggtgcgtcagcagaatatgtgatacaggatatattccgcttcctcgctcactgactcgctacgctcggtcgttcgactgcggcgagcggaaatggcttacgaacggggcggagatttcctggaagatgccaggaagatacttaacagggaagtgagagggccgcggcaaagccgtttttccataggctccgcccccctgacaagcatcacgaaatctgacgctcaaatcagtggtggcgaaacccgacaggactataaagataccaggcgtttcccctggcggctccctcgtgcgctctcctgttcctgcctttcggtttaccggtgtcattccgctgttatggccgcgtttgtctcattccacgcctgacactcagttccgggtaggcagttcgctccaagctggactgtatgcacgaaccccccgttcagtccgaccgctgcgccttatccggtaactatcgtcttgagtccaacccggaaagacatgcaaaagcaccactggcagcagccactggtaattgatttagaggagttagtcttgaagtcatgcgccggttaaggctaaactgaaaggacaagttttggtgactgcgctcctccaagccagttacctcggttcaaagagttggtagctcagagaaccttcgaaaaaccgccctgcaaggcggttttttcgttttcagagcaagagattacgcgcagaccaaaacgatctcaagaagatcatcttattaatcagataaaatatttctagatttcagtgcaatttatctcttcaaatgtagcacctgaagtcagccccatacgatataagttgtaattctcatgttagtcatgccccgcgcccaccggaaggagctgactgggttgaaggctctcaagggcatcggtcgagatcccggtgcctaatgagtgagctaacttacattaattgcgttgcgctcactgcccgctttccagtcgggaaacctgtcgtgccagctgcattaatgaatcggccaacgcgcggggagaggcggtttgcgtattgggcgccagggtggtttttcttttcaccagtgagacgggcaacagctgattgcccttcaccgcctggccctgagagagttgcagcaagcggtccacgctggtttgccccagcaggcgaaaatcctgtttgatggtggttaacggcgggatataacatgagctgtcttcggtatcgtcgtatcccactaccgagatgtccgcaccaacgcgcagcccggactcggtaatggcgcgcattgcgcccagcgccatctgatcgttggcaaccagcatcgcagtgggaacgatgccctcattcagcatttgcatggtttgttgaaaaccggacatggcactccagtcgccttcccgttccgctatcggctgaatttgattgcgagtgagatatttatgccagccagccagacgcagacgcgccgagacagaacttaatgggcccgctaacagcgcgatttgctggtgacccaatgcgaccagatgctccacgcccagtcgcgtaccgtcttcatgggagaaaataatactgttgatgggtgtctggtcagagacatcaagaaataacgccggaacattagtgcaggcagcttccacagcaatggcatcctggtcatccagcggatagttaatgatcagcccactgacgcgttgcgcgagaagattgtgcaccgccgctttacaggcttcgacgccgcttcgttctaccatcgacaccaccacgctggcacccagttgatcggcgcgagatttaatcgccgcgacaatttgcgacggcgcgtgcagggccagactggaggtggcaacgccaatcagcaacgactgtttgcccgccagttgttgtgccacgcggttgggaatgtaattcagctccgccatcgccgcttccactttttcccgcgttttcgcagaaacgtggctggcctggttcaccacgcgggaaacggtctgataagagacaccggcatactctgcgacatcgtataacgttactggtttcacattcaccaccctgaattgactctcttccgggcgctatcatgccataccgcgaaaggttttgcgccattcgatggtgtccgggatctcgacgctctcccttatgcgactcctgcattaggaaattaatacgactcactata

SEQ ID NO: 5624 - DNA, 3284 bp, Artificial Sequence
  Description of Artificial Sequence: Synthetic polynucleotide
gccaccgctgagcaataactagcataaccccttggggcctctaaacgggtcttgaggggttttttgctgaaacctcaggcatttgagaagcacacggtcacactgcttccggtagtcaataaaccggtaaaccagcaatagacataagcggctatttaacgaccctgccctgaaccgacgacaagctgacgaccgggtctccgcaagtggcacttttcggggaaatgtgcgcggaacccctatttgtttatttttctaaatacattcaaatatgtatccgctcatgaattaattcttagaaaaactcatcgagcatcaaatgaaactgcaatttattcatatcaggattatcaataccatatttttgaaaaagccgtttctgtaatgaaggagaaaactcaccgaggcagttccataggatggcaagatcctggtatcggtctgcgattccgactcgtccaacatcaatacaacctattaatttcccctcgtcaaaaataaggttatcaagtgagaaatcaccatgagtgacgactgaatccggtgagaatggcaaaagtttatgcatttctttccagacttgttcaacaggccagccattacgctcgtcatcaaaatcactcgcatcaaccaaaccgttattcattcgtgattgcgcctgagcgagacgaaatacgcggtcgctgttaaaaggacaattacaaacaggaatcgaatgcaaccggcgcaggaacactgccagcgcatcaacaatattttcacctgaatcaggatattcttctaatacctggaatgctgttttcccggggatcgcagtggtgagtaaccatgcatcatcaggagtacggataaaatgcttgatggtcggaagaggcataaattccgtcagccagtttagtctgaccatctcatctgtaacatcattggcaacgctacctttgccatgtttcagaaacaactctggcgcatcgggcttcccatacaatcgatagattgtcgcacctgattgcccgacattatcgcgagcccatttatacccatataaatcagcatccatgttggaatttaatcgcggcctagagcaagacgtttcccgttgaatatggctcatactcttcctttttcaatattattgaagcatttatcagggttattgtctcatgagcggatacatatttgaatgtatttagaaaaataaacaaataggcatgctagcgcagaaacgtcctagaagatgccaggaggatacttagcagagagacaataaggccggagcgaagccgtttttccataggctccgcccccctgacgaacatcacgaaatctgacgctcaaatcagtggtggcgaaacccgacaggactataaagataccaggcgtttccccctgatggctccctcttgcgctctcctgttcccgtcctgcggcgtccgtgttgtggtggaggctttacccaaatcaccacgtcccgttccgtgtagacagttcgctccaagctgggctgtgtgcaagaaccccccgttcagcccgactgctgcgccttatccggtaactatcatcttgagtccaacccggaaagacacgacaaaacgccactggcagcagccattggtaactgagaattagtggatttagatatcgagagtcttgaagtggtggcctaacagaggctacactgaaaggacagtatttggtatctgcgctccactaaagccagttaccaggttaagcagttccccaactgacttaaccttcgatcaaaccgcctccccaggcggttttttcgtttacagagcaggagattacgacgatcgtaaaaggatctcaagaagatcctttacggattcccgacaccatcactctagatttcagtgcaatttatctcttcaaatgtagcacctgaagtcagccccatacgatataagttgtaattctcatgttagtcatgccccgcgcccaccggaaggagctgactgggttgaaggctctcaagggcatcggtcgagatcccggtgcctaatgagtgagctaacttacattaattgcgttgcgctcactgcccgctttccagtcgggaaacctgtcgtgccagctgcattaatgaatcggccaacgcgcggggagaggcggtttgcgtattgggcgccagggtggtttttcttttcaccagtgagacgggcaacagctgattgcccttcaccgcctggccctgagagagttgcagcaagcggtccacgctggtttgccccagcaggcgaaaatcctgtttgatggtggttaacggcgggatataacatgagctgtcttcggtatcgtcgtatcccactaccgagatgtccgcaccaacgcgcagcccggactcggtaatggcgcgcattgcgcccagcgccatctgatcgttggcaaccagcatcgcagtgggaacgatgccctcattcagcatttgcatggtttgttgaaaaccggacatggcactccagtcgccttcccgttccgctatcggctgaatttgattgcgagtgagatatttatgccagccagccagacgcagacgcgccgagacagaacttaatgggcccgctaacagcgcgatttgctggtgacccaatgcgaccagatgctccacgcccagtcgcgtaccgtcttcatgggagaaaataatactgttgatgggtgtctggtcagagacatcaagaaataacgccggaacattagtgcaggcagcttccacagcaatggcatcctggtcatccagcggatagttaatgatcagcccactgacgcgttgcgcgagaagattgtgcaccgccgctttacaggcttcgacgccgcttcgttctaccatcgacaccaccacgctggcacccagttgatcggcgcgagatttaatcgccgcgacaatttgcgacggcgcgtgcagggccagactggaggtggcaacgccaatcagcaacgactgtttgcccgccagttgttgtgccacgcggttgggaatgtaattcagctccgccatcgccgcttccactttttcccgcgttttcgcagaaacgtggctggcctggttcaccacgcgggaaacggtctgataagagacaccggcatactctgcgacatcgtataacgttactggtttcacattcaccaccctgaattgactctcttccgggcgctatcatgccataccgcgaaaggttttgcgccattcgatggtgtccgggatctcgacgctctcccttatgcgactcctgaaccaagcgtacaacgtttatccgagttcaagagca

SEQ ID NO: 5625 - DNA, 3284 bp, Artificial Sequence
  Description of Artificial Sequence: Synthetic polynucleotide
gccaccgctgagcaataactagcataaccccttggggcctctaaacgggtcttgaggggttttttgctgaaacctcaggcatttgagaagcacacggtcacactgcttccggtagtcaataaaccggtaaaccagcaatagacataagcggctatttaacgaccctgccctgaaccgacgacaagctgacgaccgggtctccgcaagtggcacttttcggggaaatgtgcgcggaacccctatttgtttatttttctaaatacattcaaatatgtatccgctcatgaattaattcttagaaaaactcatcgagcatcaaatgaaactgcaatttattcatatcaggattatcaataccatatttttgaaaaagccgtttctgtaatgaaggagaaaactcaccgaggcagttccataggatggcaagatcctggtatcggtctgcgattccgactcgtccaacatcaatacaacctattaatttcccctcgtcaaaaataaggttatcaagtgagaaatcaccatgagtgacgactgaatccggtgagaatggcaaaagtttatgcatttctttccagacttgttcaacaggccagccattacgctcgtcatcaaaatcactcgcatcaaccaaaccgttattcattcgtgattgcgcctgagcgagacgaaatacgcggtcgctgttaaaaggacaattacaaacaggaatcgaatgcaaccggcgcaggaacactgccagcgcatcaacaatattttcacctgaatcaggatattcttctaatacctggaatgctgttttcccggggatcgcagtggtgagtaaccatgcatcatcaggagtacggataaaatgcttgatggtcggaagaggcataaattccgtcagccagtttagtctgaccatctcatctgtaacatcattggcaacgctacctttgccatgtttcagaaacaactctggcgcatcgggcttcccatacaatcgatagattgtcgcacctgattgcccgacattatcgcgagcccatttatacccatataaatcagcatccatgttggaatttaatcgcggcctagagcaagacgtttcccgttgaatatggctcatactcttcctttttcaatattattgaagcatttatcagggttattgtctcatgagcggatacatatttgaatgtatttagaaaaataaacaaataggcatgctagcgcagaaacgtcctagaagatgccaggaggatacttagcagagagacaataaggccggagcgaagccgtttttccataggctccgcccccctgacgaacatcacgaaatctgacgctcaaatcagtggtggcgaaacccgacaggactataaagataccaggcgtttccccctgatggctccctcttgcgctctcctgttcccgtcctgcggcgtccgtgttgtggtggaggctttacccaaatcaccacgtcccgttccgtgtagacagttcgctccaagctgggctgtgtgcaagaaccccccgttcagcccgactgctgcgccttatccggtaactatcatcttgagtccaacccggaaagacacgacaaaacgccactggcagcagccattggtaactgagaattagtggatttagatatcgagagtcttgaagtggtggcctaacagaggctacactgaaaggacagtatttggtatctgcgctccactaaagccagttaccaggttaagcagttccccaactgacttaaccttcgatcaaaccgcctccccaggcggttttttcgtttacagagcaggagattacgacgatcgtaaaaggatctcaagaagatcctttacggattcccgacaccatcactctagatttcagtgcaatttatctcttcaaatgtagcacctgaagtcagccccatacgatataagttgtaattctcatgttagtcatgccccgcgcccaccggaaggagctgactgggttgaaggctctcaagggcatcggtcgagatcccggtgcctaatgagtgagctaacttacattaattgcgttgcgctcactgcccgctttccagtcgggaaacctgtcgtgccagctgcattaatgaatcggccaacgcgcggggagaggcggtttgcgtattgggcgccagggtggtttttcttttcaccagtgagacgggcaacagctgattgcccttcaccgcctggccctgagagagttgcagcaagcggtccacgctggtttgccccagcaggcgaaaatcctgtttgatggtggttaacggcgggatataacatgagctgtcttcggtatcgtcgtatcccactaccgagatgtccgcaccaacgcgcagcccggactcggtaatggcgcgcattgcgcccagcgccatctgatcgttggcaaccagcatcgcagtgggaacgatgccctcattcagcatttgcatggtttgttgaaaaccggacatggcactccagtcgccttcccgttccgctatcggctgaatttgattgcgagtgagatatttatgccagccagccagacgcagacgcgccgagacagaacttaatgggcccgctaacagcgcgatttgctggtgacccaatgcgaccagatgctccacgcccagtcgcgtaccgtcttcatgggagaaaataatactgttgatgggtgtctggtcagagacatcaagaaataacgccggaacattagtgcaggcagcttccacagcaatggcatcctggtcatccagcggatagttaatgatcagcccactgacgcgttgcgcgagaagattgtgcaccgccgctttacaggcttcgacgccgcttcgttctaccatcgacaccaccacgctggcacccagttgatcggcgcgagatttaatcgccgcgacaatttgcgacggcgcgtgcagggccagactggaggtggcaacgccaatcagcaacgactgtttgcccgccagttgttgtgccacgcggttgggaatgtaattcagctccgccatcgccgcttccactttttcccgcgttttcgcagaaacgtggctggcctggttcaccacgcgggaaacggtctgataagagacaccggcatactctgcgacatcgtataacgttactggtttcacattcaccaccctgaattgactctcttccgggcgctatcatgccataccgcgaaaggttttgcgccattcgatggtgtccgggatctcgacgctctcccttatgcgactcctgggccaggaccggaaggtagcagccaaggcgggggac

SEQ ID NO: 5626 - DNA, 8025 bp, Artificial Sequence
  Description of Artificial Sequence: Synthetic polynucleotide
ggggaattgtgagcggataacaattcccctgtagaaataattttgtttaactttaataaggagatataccatggacgacatttctcccagcgaactgaagacgatccttcactccaagcgtgccaacctgtactacctgcaacactgccgggtactggtcaacggcgggcgggtcgagtacgtcaccgacgaaggccggcattcgcactactggaacatccccatcgccaacaccaccagcctgttgctgggcaccggtacctccattacccaggcagccatgcgcgaactggccagggccggggtattggtaggcttctgcggcggcggcggaacgccgctgttcagcgccaacgaagtggacgtcgaggtgtcctggctgacgccgcagagcgaataccgccccaccgaatacctgcagcgctgggtcggcttctggttcgatgaggaaaaacgcctggtggccgcccggcacttccagcgagccaggctggagcggattcgccacagttggctggaagaccgcgtattgcgcgacgccggcttcgccgtcgatgccaccgcactggcagttgccgtggaagattccgcccgagcgttggagcaggctcccaatcatgagcatctactgaccgaagaagcgcgcctgagcaagcgcctgttcaagctcgcagcccaggccacccgctacggcgagttcgtccgcgccaagcgcggcagcggcggcgacccggccaaccgcttcctcgaccatggcaactacctggcctacggcctcgcggcgaccgccacctgggtgctgggcattccccatggactggcggtgctacacggcaagacccggcgcggaggcctggtgttcgatgtggcggacctgatcaaggactcgctgatcctgccgcaggcatttctttccgccatgcgcggcgacgaggaacaggacttccgccaggcctgcctggacaacctgagccgcgcacaggccctggacttcatgatcgacacgctgaaagacgtggcgcagcggagcacggtgtccgcatgataataacattggaagtggataacggatccgggccctgtacaagatcctgtaaaacgacggccagtgaattcactcgagtcccggggcgatcgcagcggataacaatttcacatcctgcaggactcgagttctagaaataattttgtttaactttaagaaggagatatagatcatgaacatcctgctggtgtcgcaatgcgaaaagcgcgccctgagcgaaacccgccgcattctcgaccagttcgccgagcgccgcggcgaacggacctggcaaacgcccatcactcaagccggactggataccctgcgacgcctgctgaagaaaagcgcacggcgcaacaccgccgtagcctgtcactggatccgcggccgcgaccacagcgaactgctgtggatcgtcggtgatgccagccgcttcaacgcccagggtgcggtgccgaccaacaggacctgccgcgacatcctgcgcaaggaagacgagaacgactggcacagcgccgaggacatccgcctgctgacggtgatggcagcgctgttccacgatatcggcaaggccagccaggccttccaggccaaactgcggaaccgcggcaaaccgatggccgatgcctatcgtcacgaatgggtatcactgcgcctgttcgaagccttcgttggcccaggcagcagcgacgaggactggctgaggcgcctggcggacaagcgagagacgggcgatgcctggctgtcgcaactggccagggacgaccggcaatccgcgccacccggcccgttccagaaaagccggctaccgccgctcgcccaggcggtcggctggttgatcgtcagccatcatcgcctgcccaacggggaccatcgcggcagcgcctcgctggcacgcttgccggcccccatccagagccaatggtgcggcgcacgcgacgcagacgcaaaagaaaaggccgcctgctggcagttcccccacggcctgcccttcgccagcgcccattggcgcgccaggacagcgctatgcgcgcagagcatgctcgagcgtcccggcctgctggctcggggaccggccttgttgcatgattcctacgtcatgcatgtgtcccgactgatcctgatgctcgcggaccaccactattccagtctccctgccgactcccggctgggcgacccgaacttccccttgcacgccaacaccgaccgggacagcggcaaactaaagcagcgcctggacgaacacctgctcggcgtcgccctgcacagtcgcaagctcgccggcaccctgccacgcctggagcgacaactaccgcgccttgcccggcacaagggcttcacccgccgggtcgagcagccgcgcttccgctggcaggacaaggcctacgactgcgcgatggcctgccgcgagcaggctatggagcatggattcttcggcctcaacctggcgtcgaccggttgcggtaagaccctcgccaacggccgtatcctgtatgcgctggccgatccgcaacgcggcgcgcgtttcagcatcgctctcggcctgcgcagcttgaccctgcaaaccgggcaggcctaccgcgagcggctcggcctgggcgacgacgacctcgctatcctggtcggcggcagcgccgcccgcgaactgttcgaaaagcagcaggagcgcctggagcgcagcggtagcgagtcagcccaggagctgctggcggaaaacagccatgtacacttcgccggcacgctcgaggacggccctctacgcgagtggctcggcaggaacagcgcgggaaaccgcctactccaggcgcccatcctggcctgcaccatcgaccacctgatgcccgccagcgaaagcctgcgcggcggacaccagatagcgccactgctccgcctgatgacttccgacctggtgctcgacgaggtcgacgacttcgatatcgacgacctgcccgccctgtcgcggctggtgcactgggccggcctgttcggcagccgcgtgctgctctcctccgcgaccctgccgccggccttggtgcagggcctgttcgaggcctatcgcagcggccgggaaatcttccagcgccatcgtggcgctcccggacgcgctacggaaatccgctgtgcctggttcgacgagttctccagccaatccagcgcccacggcgccgtaacctccttcagcgaagcgcatgcgaccttcgtcgcccagcgtctggcgaagctcgagcaactgccgccacgtcgccaggcgcagctatgcaccgtgcatgccgctggcgaggcccgtcccgcgctgtgccgcgagttggccgggcagatgaatacctggatggctgacctgcatcgctgccatcacaccgaacaccaaggacgtcgcatcagtttcggcctgctacggctggccaacatcgaacccctgatcgaactggcccaggccatcctcgcccagggtgcgcccgaggggttgcatgtccatctgtgtgtctaccattcgcggcatccccttctggtccgctcggccatcgagcgacaactcgatgaactgctgaagcgttcggacgacgacgccgccgcgctgttcgctcgtccgacgctggccaaggcgctccaggccagcacggagcgggatcatctgttcgtcgtactcgcctcgccggtggcggaggtcggtcgcgaccacgattacgactgggccatcgtcgaaccctcctccatgcgctcgatcatccagttggccgggcgaatccgccgccatcgctccggcttcagcggcgaggccaacctatacctgctatcgcgcaatatccgctcgctggaagggcagaatccggcgttccagcggcccggcttcgagacccccgacttccctcttgacagccacgacctgcacgacctgctcgaccccgccctactcgcccgcatcgacgccagcccacgaatcgtcgaaccgttcccactgttcccacgcagccggttggtcgacctggaacaccgacgcctgcgcgcgctgatgcttgccgacgacccaccgtcgtccctgctcggcgtaccgctctggtggcaaaccccggcatcgctcagcggcgccctgcaaaccagccaaccatttcgcgcaggcgccaaggagcgatgctacgccctgctgccggacgaggacgacgaggagcgcttgcatttcagccgctacgaagaagggacctggagcaaccaggacaacctgttgcgcaacctcgacctcacctatggcccgcgcatccagacatggggcacggtcaactatcgggaggagctagtcgcaatggccggccgcgaggacctcgacctgcgtcaatgcgccatgcgctacggcgaggtgagattgcgagaaaacacccagggatggagctaccacccttatttggggttcaagaaatacaactgataataagctgctgccaccgctgagcaataactagcataaccccttggggcctctaaacgggtcttgaggggttttttgctgaaacctcaggcatttgagaagcacacggtcacactgcttccggtagtcaataaaccggtaaaccagcaatagacataagcggctatttaacgaccctgccctgaaccgacgaccgggtcgaatttgctttcgaatttctgccattcatccgcttattatcacttattcaggcgtagcaccaggcgtttaagggcaccaataactgccttaaaaaaattacgccccgccctgccactcatcgcagtactgttgtaattcattaagcattctgccgacatggaagccatcacagacggcatgatgaacctgaatcgccagcggcatcagcaccttgtcgccttgcgtataatatttgcccatagtgaaaacgggggcgaagaagttgtccatattggccacgtttaaatcaaaactggtgaaactcacccagggattggctgagacgaaaaacatattctcaataaaccctttagggaaataggccaggttttcaccgtaacacgccacatcttgcgaatatatgtgtagaaactgccggaaatcgtcgtggtattcactccagagcgatgaaaacgtttcagtttgctcatggaaaacggtgtaacaagggtgaacactatcccatatcaccagctcaccgtctttcattgccatacggaactccggatgagcattcatcaggcgggcaagaatgtgaataaaggccggataaaacttgtgcttatttttctttacggtctttaaaaaggccgtaatatccagctgaacggtctggttataggtacattgagcaactgactgaaatgcctcaaaatgttctttacgatgccattgggatatatcaacggtggtatatccagtgatttttttctccattttagcttccttagctcctgaaaatctcgataactcaaaaaatacgcccggtagtgatcttatttcattatggtgaaagttggaacctcttacgtgccgatcaacgtctcattttcgccaaaagttggcccagggcttcccggtatcaacagggacaccaggatttatttattctgcgaagtgatcttccgtcacaggtatttattcggcgcaaagtgcgtcgggtgatgctgccaacttactgatttagtgtatgatggtgtttttgaggtgctccagtggcttctgtttctatcagctgtccctcctgttcagctactgacggggtggtgcgtaacggcaaaagcaccgccggacatcagcgctagcggagtgtatactggcttactatgttggcactgatgagggtgtcagtgaagtgcttcatgtggcaggagaaaaaaggctgcaccggtgcgtcagcagaatatgtgatacaggatatattccgcttcctcgctcactgactcgctacgctcggtcgttcgactgcggcgagcggaaatggcttacgaacggggcggagatttcctggaagatgccaggaagatacttaacagggaagtgagagggccgcggcaaagccgtttttccataggctccgcccccctgacaagcatcacgaaatctgacgctcaaatcagtggtggcgaaacccgacaggactataaagataccaggcgtttcccctggcggctccctcgtgcgctctcctgttcctgcctttcggtttaccggtgtcattccgctgttatggccgcgtttgtctcattccacgcctgacactcagttccgggtaggcagttcgctccaagctggactgtatgcacgaaccccccgttcagtccgaccgctgcgccttatccggtaactatcgtcttgagtccaacccggaaagacatgcaaaagcaccactggcagcagccactggtaattgatttagaggagttagtcttgaagtcatgcgccggttaaggctaaactgaaaggacaagttttggtgactgcgctcctccaagccagttacctcggttcaaagagttggtagctcagagaaccttcgaaaaaccgccctgcaaggcggttttttcgttttcagagcaagagattacgcgcagaccaaaacgatctcaagaagatcatcttattaatcagataaaatatttctagatttcagtgcaatttatctcttcaaatgtagcacctgaagtcagccccatacgatataagttgtaattctcatgttagtcatgccccgcgcccaccggaaggagctgactgggttgaaggctctcaagggcatcggtcgagatcccggtgcctaatgagtgagctaacttacattaattgcgttgcgctcactgcccgctttccagtcgggaaacctgtcgtgccagctgcattaatgaatcggccaacgcgcggggagaggcggtttgcgtattgggcgccagggtggtttttcttttcaccagtgagacgggcaacagctgattgcccttcaccgcctggccctgagagagttgcagcaagcggtccacgctggtttgccccagcaggcgaaaatcctgtttgatggtggttaacggcgggatataacatgagctgtcttcggtatcgtcgtatcccactaccgagatgtccgcaccaacgcgcagcccggactcggtaatggcgcgcattgcgcccagcgccatctgatcgttggcaaccagcatcgcagtgggaacgatgccctcattcagcatttgcatggtttgttgaaaaccggacatggcactccagtcgccttcccgttccgctatcggctgaatttgattgcgagtgagatatttatgccagccagccagacgcagacgcgccgagacagaacttaatgggcccgctaacagcgcgatttgctggtgacccaatgcgaccagatgctccacgcccagtcgcgtaccgtcttcatgggagaaaataatactgttgatgggtgtctggtcagagacatcaagaaataacgccggaacattagtgcaggcagcttccacagcaatggcatcctggtcatccagcggatagttaatgatcagcccactgacgcgttgcgcgagaagattgtgcaccgccgctttacaggcttcgacgccgcttcgttctaccatcgacaccaccacgctggcacccagttgatcggcgcgagatttaatcgccgcgacaatttgcgacggcgcgtgcagggccagactggaggtggcaacgccaatcagcaacgactgtttgcccgccagttgttgtgccacgcggttgggaatgtaattcagctccgccatcgccgcttccactttttcccgcgttttcgcagaaacgtggctggcctggttcaccacgcgggaaacggtctgataagagacaccggcatactctgcgacatcgtataacgttactggtttcacattcaccaccctgaattgactctcttccgggcgctatcatgccataccgcgaaaggttttgcgccattcgatggtgtccgggatctcgacgctctcccttatgcgactcctgcattaggaaattaatacgactcactata

SEQ ID NO: 5627 - DNA, 3482 bp, Artificial Sequence
  Description of Artificial Sequence: Synthetic polynucleotide
ggggaattgtgagcggataacaattcccctgtagaaatggtctcgttcactgccgtgtaggcagctaagaaaaggaccggaaggtagcagccaaggcgggggacgttcactgccgtgtaggcagctaagaaaacctaggctgctgccaccgctgagcaataactagcataaccccttggggcctctaaacgggtcttgaggggttttttgctgaaacctcaggcatttgagaagcacacggtcacactgcttccggtagtcaataaaccggtaaaccagcaatagacataagcggctatttaacgaccctgccctgaaccgacgaccgggtcatcgtggccggatcttgcggcccctcggcttgaacgaattgttagacattatttgccgactaccttggtgatctcgcctttcacgtagtggacaaattcttccaactgatctgcgcgcgaggccaagcgatcttcttcttgtccaagataagcctgtctagcttcaagtatgacgggctgatactgggccggcaggcgctccattgcccagtcggcagcgacatccttcggcgcgattttgccggttactgcgctgtaccaaatgcgggacaacgtaagcactacatttcgctcatcgccagcccagtcgggcggcgagttccatagcgttaaggtttcatttagcgcctcaaatagatcctgttcaggaaccggatcaaagagttcctccgccgctggacctaccaaggcaacgctatgttctcttgcttttgtcagcaagatagccagatcaatgtcgatcgtggctggctcgaagatacctgcaagaatgtcattgcgctgccattctccaaattgcagttcgcgcttagctggataacgccacggaatgatgtcgtcgtgcacaacaatggtgacttctacagcgcggagaatctcgctctctccaggggaagccgaagtttccaaaaggtcgttgatcaaagctcgccgcgttgtttcatcaagccttacggtcaccgtaaccagcaaatcaatatcactgtgtggcttcaggccgccatccactgcggagccgtacaaatgtacggccagcaacgtcggttcgagatggcgctcgatgacgccaactacctctgatagttgagtcgatacttcggcgatcaccgcttccctcatactcttcctttttcaatattattgaagcatttatcagggttattgtctcatgagcggatacatatttgaatgtatttagaaaaataaacaaatagctagctcactcggtcgctacgctccgggcgtgagactgcggcgggcgctgcggacacatacaaagttacccacagattccgtggataagcaggggactaacatgtgaggcaaaacagcagggccgcgccggtggcgtttttccataggctccgccctcctgccagagttcacataaacagacgcttttccggtgcatctgtgggagccgtgaggctcaaccatgaatctgacagtacgggcgaaacccgacaggacttaaagatccccaccgtttccggcgggtcgctccctcttgcgctctcctgttccgaccctgccgtttaccggatacctgttccgcctttctcccttacgggaagtgtggcgctttctcatagctcacacactggtatctcggctcggtgtaggtcgttcgctccaagctgggctgtaagcaagaactccccgttcagcccgactgctgcgccttatccggtaactgttcacttgagtccaacccggaaaagcacggtaaaacgccactggcagcagccattggtaactgggagttcgcagaggatttgtttagctaaacacgcggttgctcttgaagtgtgcgccaaagtccggctacactggaaggacagatttggttgctgtgctctgcgaaagccagttaccacggttaagcagttccccaactgacttaaccttcgatcaaaccacctccccaggtggttttttcgtttacagggcaaaagattacgcgcagaaaaaaaggatctcaagaagatcctttgatcttttctactgaaccgctctagatttcagtgcaatttatctcttcaaatgtagcacctgaagtcagccccatacgatataagttgtaattctcatgttagtcatgccccgcgcccaccggaaggagctgactgggttgaaggctctcaagggcatcggtcgagatcccggtgcctaatgagtgagctaacttacattaattgcgttgcgctcactgcccgctttccagtcgggaaacctgtcgtgccagctgcattaatgaatcggccaacgcgcggggagaggcggtttgcgtattgggcgccagggtggtttttcttttcaccagtgagacgggcaacagctgattgcccttcaccgcctggccctgagagagttgcagcaagcggtccacgctggtttgccccagcaggcgaaaatcctgtttgatggtggttaacggcgggatataacatgagctgtcttcggtatcgtcgtatcccactaccgagatgtccgcaccaacgcgcagcccggactcggtaatggcgcgcattgcgcccagcgccatctgatcgttggcaaccagcatcgcagtgggaacgatgccctcattcagcatttgcatggtttgttgaaaaccggacatggcactccagtcgccttcccgttccgctatcggctgaatttgattgcgagtgagatatttatgccagccagccagacgcagacgcgccgagacagaacttaatgggcccgctaacagcgcgatttgctggtgacccaatgcgaccagatgctccacgcccagtcgcgtaccgtcttcatgggagaaaataatactgttgatgggtgtctggtcagagacatcaagaaataacgccggaacattagtgcaggcagcttccacagcaatggcatcctggtcatccagcggatagttaatgatcagcccactgacgcgttgcgcgagaagattgtgcaccgccgctttacaggcttcgacgccgcttcgttctaccatcgacaccaccacgctggcacccagttgatcggcgcgagatttaatcgccgcgacaatttgcgacggcgcgtgcagggccagactggaggtggcaacgccaatcagcaacgactgtttgcccgccagttgttgtgccacgcggttgggaatgtaattcagctccgccatcgccgcttccactttttcccgcgttttcgcagaaacgtggctggcctggttcaccacgcgggaaacggtctgataagagacaccggcatactctgcgacatcgtataacgttactggtttcacattcaccaccctgaattgactctcttccgggcgctatcatgccataccgcgaaaggttttgcgccattcgatggtgtccgggatctcgacgctctcccttatgcgactcctgcattaggaaattaatacgactcactata

SEQ ID NO: 5628 - DNA, 3476 bp, Artificial Sequence
  Description of Artificial Sequence: Synthetic polynucleotide
ggggaattgtgagcggataacaattcccctgtagaaatgtgaactgccgtataggcagccaagaaaaggaccggaaggtagcagccaaggcgggggacgtgaactgccgtataggcagccaagattacctaggctgctgccaccgctgagcaataactagcataaccccttggggcctctaaacgggtcttgaggggttttttgctgaaacctcaggcatttgagaagcacacggtcacactgcttccggtagtcaataaaccggtaaaccagcaatagacataagcggctatttaacgaccctgccctgaaccgacgaccgggtcatcgtggccggatcttgcggcccctcggcttgaacgaattgttagacattatttgccgactaccttggtgatctcgcctttcacgtagtggacaaattcttccaactgatctgcgcgcgaggccaagcgatcttcttcttgtccaagataagcctgtctagcttcaagtatgacgggctgatactgggccggcaggcgctccattgcccagtcggcagcgacatccttcggcgcgattttgccggttactgcgctgtaccaaatgcgggacaacgtaagcactacatttcgctcatcgccagcccagtcgggcggcgagttccatagcgttaaggtttcatttagcgcctcaaatagatcctgttcaggaaccggatcaaagagttcctccgccgctggacctaccaaggcaacgctatgttctcttgcttttgtcagcaagatagccagatcaatgtcgatcgtggctggctcgaagatacctgcaagaatgtcattgcgctgccattctccaaattgcagttcgcgcttagctggataacgccacggaatgatgtcgtcgtgcacaacaatggtgacttctacagcgcggagaatctcgctctctccaggggaagccgaagtttccaaaaggtcgttgatcaaagctcgccgcgttgtttcatcaagccttacggtcaccgtaaccagcaaatcaatatcactgtgtggcttcaggccgccatccactgcggagccgtacaaatgtacggccagcaacgtcggttcgagatggcgctcgatgacgccaactacctctgatagttgagtcgatacttcggcgatcaccgcttccctcatactcttcctttttcaatattattgaagcatttatcagggttattgtctcatgagcggatacatatttgaatgtatttagaaaaataaacaaatagctagctcactcggtcgctacgctccgggcgtgagactgcggcgggcgctgcggacacatacaaagttacccacagattccgtggataagcaggggactaacatgtgaggcaaaacagcagggccgcgccggtggcgtttttccataggctccgccctcctgccagagttcacataaacagacgcttttccggtgcatctgtgggagccgtgaggctcaaccatgaatctgacagtacgggcgaaacccgacaggacttaaagatccccaccgtttccggcgggtcgctccctcttgcgctctcctgttccgaccctgccgtttaccggatacctgttccgcctttctcccttacgggaagtgtggcgctttctcatagctcacacactggtatctcggctcggtgtaggtcgttcgctccaagctgggctgtaagcaagaactccccgttcagcccgactgctgcgccttatccggtaactgttcacttgagtccaacccggaaaagcacggtaaaacgccactggcagcagccattggtaactgggagttcgcagaggatttgtttagctaaacacgcggttgctcttgaagtgtgcgccaaagtccggctacactggaaggacagatttggttgctgtgctctgcgaaagccagttaccacggttaagcagttccccaactgacttaaccttcgatcaaaccacctccccaggtggttttttcgtttacagggcaaaagattacgcgcagaaaaaaaggatctcaagaagatcctttgatcttttctactgaaccgctctagatttcagtgcaatttatctcttcaaatgtagcacctgaagtcagccccatacgatataagttgtaattctcatgttagtcatgccccgcgcccaccggaaggagctgactgggttgaaggctctcaagggcatcggtcgagatcccggtgcctaatgagtgagctaacttacattaattgcgttgcgctcactgcccgctttccagtcgggaaacctgtcgtgccagctgcattaatgaatcggccaacgcgcggggagaggcggtttgcgtattgggcgccagggtggtttttcttttcaccagtgagacgggcaacagctgattgcccttcaccgcctggccctgagagagttgcagcaagcggtccacgctggtttgccccagcaggcgaaaatcctgtttgatggtggttaacggcgggatataacatgagctgtcttcggtatcgtcgtatcccactaccgagatgtccgcaccaacgcgcagcccggactcggtaatggcgcgcattgcgcccagcgccatctgatcgttggcaaccagcatcgcagtgggaacgatgccctcattcagcatttgcatggtttgttgaaaaccggacatggcactccagtcgccttcccgttccgctatcggctgaatttgattgcgagtgagatatttatgccagccagccagacgcagacgcgccgagacagaacttaatgggcccgctaacagcgcgatttgctggtgacccaatgcgaccagatgctccacgcccagtcgcgtaccgtcttcatgggagaaaataatactgttgatgggtgtctggtcagagacatcaagaaataacgccggaacattagtgcaggcagcttccacagcaatggcatcctggtcatccagcggatagttaatgatcagcccactgacgcgttgcgcgagaagattgtgcaccgccgctttacaggcttcgacgccgcttcgttctaccatcgacaccaccacgctggcacccagttgatcggcgcgagatttaatcgccgcgacaatttgcgacggcgcgtgcagggccagactggaggtggcaacgccaatcagcaacgactgtttgcccgccagttgttgtgccacgcggttgggaatgtaattcagctccgccatcgccgcttccactttttcccgcgttttcgcagaaacgtggctggcctggttcaccacgcgggaaacggtctgataagagacaccggcatactctgcgacatcgtataacgttactggtttcacattcaccaccctgaattgactctcttccgggcgctatcatgccataccgcgaaaggttttgcgccattcgatggtgtccgggatctcgacgctctcccttatgcgactcctgcattaggaaattaatacgactcactata

SEQ ID NO: 5629 - DNA, 3476 bp, Artificial Sequence
  Description of Artificial Sequence: Synthetic polynucleotide
ggggaattgtgagcggataacaattcccctgtagaaatgtgaactgccgtataggcagccaagattaggaccggaaggtagcagccaaggcgggggacattttctgccgtaaaggcagatattattacctaggctgctgccaccgctgagcaataactagcataaccccttggggcctctaaacgggtcttgaggggttttttgctgaaacctcaggcatttgagaagcacacggtcacactgcttccggtagtcaataaaccggtaaaccagcaatagacataagcggctatttaacgaccctgccctgaaccgacgaccgggtcatcgtggccggatcttgcggcccctcggcttgaacgaattgttagacattatttgccgactaccttggtgatctcgcctttcacgtagtggacaaattcttccaactgatctgcgcgcgaggccaagcgatcttcttcttgtccaagataagcctgtctagcttcaagtatgacgggctgatactgggccggcaggcgctccattgcccagtcggcagcgacatccttcggcgcgattttgccggttactgcgctgtaccaaatgcgggacaacgtaagcactacatttcgctcatcgccagcccagtcgggcggcgagttccatagcgttaaggtttcatttagcgcctcaaatagatcctgttcaggaaccggatcaaagagttcctccgccgctggacctaccaaggcaacgctatgttctcttgcttttgtcagcaagatagccagatcaatgtcgatcgtggctggctcgaagatacctgcaagaatgtcattgcgctgccattctccaaattgcagttcgcgcttagctggataacgccacggaatgatgtcgtcgtgcacaacaatggtgacttctacagcgcggagaatctcgctctctccaggggaagccgaagtttccaaaaggtcgttgatcaaagctcgccgcgttgtttcatcaagccttacggtcaccgtaaccagcaaatcaatatcactgtgtggcttcaggccgccatccactgcggagccgtacaaatgtacggccagcaacgtcggttcgagatggcgctcgatgacgccaactacctctgatagttgagtcgatacttcggcgatcaccgcttccctcatactcttcctttttcaatattattgaagcatttatcagggttattgtctcatgagcggatacatatttgaatgtatttagaaaaataaacaaatagctagctcactcggtcgctacgctccgggcgtgagactgcggcgggcgctgcggacacatacaaagttacccacagattccgtggataagcaggggactaacatgtgaggcaaaacagcagggccgcgccggtggcgtttttccataggctccgccctcctgccagagttcacataaacagacgcttttccggtgcatctgtgggagccgtgaggctcaaccatgaatctgacagtacgggcgaaacccgacaggacttaaagatccccaccgtttccggcgggtcgctccctcttgcgctctcctgttccgaccctgccgtttaccggatacctgttccgcctttctcccttacgggaagtgtggcgctttctcatagctcacacactggtatctcggctcggtgtaggtcgttcgctccaagctgggctgtaagcaagaactccccgttcagcccgactgctgcgccttatccggtaactgttcacttgagtccaacccggaaaagcacggtaaaacgccactggcagcagccattggtaactgggagttcgcagaggatttgtttagctaaacacgcggttgctcttgaagtgtgcgccaaagtccggctacactggaaggacagatttggttgctgtgctctgcgaaagccagttaccacggttaagcagttccccaactgacttaaccttcgatcaaaccacctccccaggtggttttttcgtttacagggcaaaagattacgcgcagaaaaaaaggatctcaagaagatcctttgatcttttctactgaaccgctctagatttcagtgcaatttatctcttcaaatgtagcacctgaagtcagccccatacgatataagttgtaattctcatgttagtcatgccccgcgcccaccggaaggagctgactgggttgaaggctctcaagggcatcggtcgagatcccggtgcctaatgagtgagctaacttacattaattgcgttgcgctcactgcccgctttccagtcgggaaacctgtcgtgccagctgcattaatgaatcggccaacgcgcggggagaggcggtttgcgtattgggcgccagggtggtttttcttttcaccagtgagacgggcaacagctgattgcccttcaccgcctggccctgagagagttgcagcaagcggtccacgctggtttgccccagcaggcgaaaatcctgtttgatggtggttaacggcgggatataacatgagctgtcttcggtatcgtcgtatcccactaccgagatgtccgcaccaacgcgcagcccggactcggtaatggcgcgcattgcgcccagcgccatctgatcgttggcaaccagcatcgcagtgggaacgatgccctcattcagcatttgcatggtttgttgaaaaccggacatggcactccagtcgccttcccgttccgctatcggctgaatttgattgcgagtgagatatttatgccagccagccagacgcagacgcgccgagacagaacttaatgggcccgctaacagcgcgatttgctggtgacccaatgcgaccagatgctccacgcccagtcgcgtaccgtcttcatgggagaaaataatactgttgatgggtgtctggtcagagacatcaagaaataacgccggaacattagtgcaggcagcttccacagcaatggcatcctggtcatccagcggatagttaatgatcagcccactgacgcgttgcgcgagaagattgtgcaccgccgctttacaggcttcgacgccgcttcgttctaccatcgacaccaccacgctggcacccagttgatcggcgcgagatttaatcgccgcgacaatttgcgacggcgcgtgcagggccagactggaggtggcaacgccaatcagcaacgactgtttgcccgccagttgttgtgccacgcggttgggaatgtaattcagctccgccatcgccgcttccactttttcccgcgttttcgcagaaacgtggctggcctggttcaccacgcgggaaacggtctgataagagacaccggcatactctgcgacatcgtataacgttactggtttcacattcaccaccctgaattgactctcttccgggcgctatcatgccataccgcgaaaggttttgcgccattcgatggtgtccgggatctcgacgctctcccttatgcgactcctgcattaggaaattaatacgactcactata

SEQ ID NO: 5630 - DNA, 3476 bp, Artificial Sequence
  Description of Artificial Sequence: Synthetic polynucleotide
ccataggctgctgccaccgctgagcaataactagcataaccccttggggcctctaaacgggtcttgaggggttttttgctgaaacctcaggcatttgagaagcacacggtcacactgcttccggtagtcaataaaccggtaaaccagcaatagacataagcggctatttaacgaccctgccctgaaccgacgaccgggtcatcgtggccggatcttgcggcccctcggcttgaacgaattgttagacattatttgccgactaccttggtgatctcgcctttcacgtagtggacaaattcttccaactgatctgcgcgcgaggccaagcgatcttcttcttgtccaagataagcctgtctagcttcaagtatgacgggctgatactgggccggcaggcgctccattgcccagtcggcagcgacatccttcggcgcgattttgccggttactgcgctgtaccaaatgcgggacaacgtaagcactacatttcgctcatcgccagcccagtcgggcggcgagttccatagcgttaaggtttcatttagcgcctcaaatagatcctgttcaggaaccggatcaaagagttcctccgccgctggacctaccaaggcaacgctatgttctcttgcttttgtcagcaagatagccagatcaatgtcgatcgtggctggctcgaagatacctgcaagaatgtcattgcgctgccattctccaaattgcagttcgcgcttagctggataacgccacggaatgatgtcgtcgtgcacaacaatggtgacttctacagcgcggagaatctcgctctctccaggggaagccgaagtttccaaaaggtcgttgatcaaagctcgccgcgttgtttcatcaagccttacggtcaccgtaaccagcaaatcaatatcactgtgtggcttcaggccgccatccactgcggagccgtacaaatgtacggccagcaacgtcggttcgagatggcgctcgatgacgccaactacctctgatagttgagtcgatacttcggcgatcaccgcttccctcatactcttcctttttcaatattattgaagcatttatcagggttattgtctcatgagcggatacatatttgaatgtatttagaaaaataaacaaatagctagctcactcggtcgctacgctccgggcgtgagactgcggcgggcgctgcggacacatacaaagttacccacagattccgtggataagcaggggactaacatgtgaggcaaaacagcagggccgcgccggtggcgtttttccataggctccgccctcctgccagagttcacataaacagacgcttttccggtgcatctgtgggagccgtgaggctcaaccatgaatctgacagtacgggcgaaacccgacaggacttaaagatccccaccgtttccggcgggtcgctccctcttgcgctctcctgttccgaccctgccgtttaccggatacctgttccgcctttctcccttacgggaagtgtggcgctttctcatagctcacacactggtatctcggctcggtgtaggtcgttcgctccaagctgggctgtaagcaagaactccccgttcagcccgactgctgcgccttatccggtaactgttcacttgagtccaacccggaaaagcacggtaaaacgccactggcagcagccattggtaactgggagttcgcagaggatttgtttagctaaacacgcggttgctcttgaagtgtgcgccaaagtccggctacactggaaggacagatttggttgctgtgctctgcgaaagccagttaccacggttaagcagttccccaactgacttaaccttcgatcaaaccacctccccaggtggttttttcgtttacagggcaaaagattacgcgcagaaaaaaaggatctcaagaagatcctttgatcttttctactgaaccgctctagatttcagtgcaatttatctcttcaaatgtagcacctgaagtcagccccatacgatataagttgtaattctcatgttagtcatgccccgcgcccaccggaaggagctgactgggttgaaggctctcaagggcatcggtcgagatcccggtgcctaatgagtgagctaacttacattaattgcgttgcgctcactgcccgctttccagtcgggaaacctgtcgtgccagctgcattaatgaatcggccaacgcgcggggagaggcggtttgcgtattgggcgccagggtggtttttcttttcaccagtgagacgggcaacagctgattgcccttcaccgcctggccctgagagagttgcagcaagcggtccacgctggtttgccccagcaggcgaaaatcctgtttgatggtggttaacggcgggatataacatgagctgtcttcggtatcgtcgtatcccactaccgagatgtccgcaccaacgcgcagcccggactcggtaatggcgcgcattgcgcccagcgccatctgatcgttggcaaccagcatcgcagtgggaacgatgccctcattcagcatttgcatggtttgttgaaaaccggacatggcactccagtcgccttcccgttccgctatcggctgaatttgattgcgagtgagatatttatgccagccagccagacgcagacgcgccgagacagaacttaatgggcccgctaacagcgcgatttgctggtgacccaatgcgaccagatgctccacgcccagtcgcgtaccgtcttcatgggagaaaataatactgttgatgggtgtctggtcagagacatcaagaaataacgccggaacattagtgcaggcagcttccacagcaatggcatcctggtcatccagcggatagttaatgatcagcccactgacgcgttgcgcgagaagattgtgcaccgccgctttacaggcttcgacgccgcttcgttctaccatcgacaccaccacgctggcacccagttgatcggcgcgagatttaatcgccgcgacaatttgcgacggcgcgtgcagggccagactggaggtggcaacgccaatcagcaacgactgtttgcccgccagttgttgtgccacgcggttgggaatgtaattcagctccgccatcgccgcttccactttttcccgcgttttcgcagaaacgtggctggcctggttcaccacgcgggaaacggtctgataagagacaccggcatactctgcgacatcgtataacgttactggtttcacattcaccaccctgaattgactctcttccgggcgctatcatgccataccgcgaaaggttttgcgccattcgatggtgtccgggatctcgacgctctcccttatgcgactcctgcattaggaaattaatacgactcactataggggaattgtgagcggataacaattcccctgtagccgggtgaactgccgagtaggtagctgataacaagcgtacaacgtttatccgagttcaagagcagtgaactgccgagtaggtagctgataac

SEQ ID NO: 5631 - DNA, 3476 bp, Artificial Sequence
  Description of Artificial Sequence: Synthetic polynucleotide
ccataggctgctgccaccgctgagcaataactagcataaccccttggggcctctaaacgggtcttgaggggttttttgctgaaacctcaggcatttgagaagcacacggtcacactgcttccggtagtcaataaaccggtaaaccagcaatagacataagcggctatttaacgaccctgccctgaaccgacgaccgggtcatcgtggccggatcttgcggcccctcggcttgaacgaattgttagacattatttgccgactaccttggtgatctcgcctttcacgtagtggacaaattcttccaactgatctgcgcgcgaggccaagcgatcttcttcttgtccaagataagcctgtctagcttcaagtatgacgggctgatactgggccggcaggcgctccattgcccagtcggcagcgacatccttcggcgcgattttgccggttactgcgctgtaccaaatgcgggacaacgtaagcactacatttcgctcatcgccagcccagtcgggcggcgagttccatagcgttaaggtttcatttagcgcctcaaatagatcctgttcaggaaccggatcaaagagttcctccgccgctggacctaccaaggcaacgctatgttctcttgcttttgtcagcaagatagccagatcaatgtcgatcgtggctggctcgaagatacctgcaagaatgtcattgcgctgccattctccaaattgcagttcgcgcttagctggataacgccacggaatgatgtcgtcgtgcacaacaatggtgacttctacagcgcggagaatctcgctctctccaggggaagccgaagtttccaaaaggtcgttgatcaaagctcgccgcgttgtttcatcaagccttacggtcaccgtaaccagcaaatcaatatcactgtgtggcttcaggccgccatccactgcggagccgtacaaatgtacggccagcaacgtcggttcgagatggcgctcgatgacgccaactacctctgatagttgagtcgatacttcggcgatcaccgcttccctcatactcttcctttttcaatattattgaagcatttatcagggttattgtctcatgagcggatacatatttgaatgtatttagaaaaataaacaaatagctagctcactcggtcgctacgctccgggcgtgagactgcggcgggcgctgcggacacatacaaagttacccacagattccgtggataagcaggggactaacatgtgaggcaaaacagcagggccgcgccggtggcgtttttccataggctccgccctcctgccagagttcacataaacagacgcttttccggtgcatctgtgggagccgtgaggctcaaccatgaatctgacagtacgggcgaaacccgacaggacttaaagatccccaccgtttccggcgggtcgctccctcttgcgctctcctgttccgaccctgccgtttaccggatacctgttccgcctttctcccttacgggaagtgtggcgctttctcatagctcacacactggtatctcggctcggtgtaggtcgttcgctccaagctgggctgtaagcaagaactccccgttcagcccgactgctgcgccttatccggtaactgttcacttgagtccaacccggaaaagcacggtaaaacgccactggcagcagccattggtaactgggagttcgcagaggatttgtttagctaaacacgcggttgctcttgaagtgtgcgccaaagtccggctacactggaaggacagatttggttgctgtgctctgcgaaagccagttaccacggttaagcagttccccaactgacttaaccttcgatcaaaccacctccccaggtggttttttcgtttacagggcaaaagattacgcgcagaaaaaaaggatctcaagaagatcctttgatcttttctactgaaccgctctagatttcagtgcaatttatctcttcaaatgtagcacctgaagtcagccccatacgatataagttgtaattctcatgttagtcatgccccgcgcccaccggaaggagctgactgggttgaaggctctcaagggcatcggtcgagatcccggtgcctaatgagtgagctaacttacattaattgcgttgcgctcactgcccgctttccagtcgggaaacctgtcgtgccagctgcattaatgaatcggccaacgcgcggggagaggcggtttgcgtattgggcgccagggtggtttttcttttcaccagtgagacgggcaacagctgattgcccttcaccgcctggccctgagagagttgcagcaagcggtccacgctggtttgccccagcaggcgaaaatcctgtttgatggtggttaacggcgggatataacatgagctgtcttcggtatcgtcgtatcccactaccgagatgtccgcaccaacgcgcagcccggactcggtaatggcgcgcattgcgcccagcgccatctgatcgttggcaaccagcatcgcagtgggaacgatgccctcattcagcatttgcatggtttgttgaaaaccggacatggcactccagtcgccttcccgttccgctatcggctgaatttgattgcgagtgagatatttatgccagccagccagacgcagacgcgccgagacagaacttaatgggcccgctaacagcgcgatttgctggtgacccaatgcgaccagatgctccacgcccagtcgcgtaccgtcttcatgggagaaaataatactgttgatgggtgtctggtcagagacatcaagaaataacgccggaacattagtgcaggcagcttccacagcaatggcatcctggtcatccagcggatagttaatgatcagcccactgacgcgttgcgcgagaagattgtgcaccgccgctttacaggcttcgacgccgcttcgttctaccatcgacaccaccacgctggcacccagttgatcggcgcgagatttaatcgccgcgacaatttgcgacggcgcgtgcagggccagactggaggtggcaacgccaatcagcaacgactgtttgcccgccagttgttgtgccacgcggttgggaatgtaattcagctccgccatcgccgcttccactttttcccgcgttttcgcagaaacgtggctggcctggttcaccacgcgggaaacggtctgataagagacaccggcatactctgcgacatcgtataacgttactggtttcacattcaccaccctgaattgactctcttccgggcgctatcatgccataccgcgaaaggttttgcgccattcgatggtgtccgggatctcgacgctctcccttatgcgactcctgcattaggaaattaatacgactcactataggggaattgtgagcggataacaattcccctgtagccggtcattactactgcaaagtagctgataacaagcgtacaacgtttatccgagttcaagagcactttactgctgaataagtagataactac

SEQ ID NO: 5632 - DNA, 3476 bp, Artificial Sequence
  Description of Artificial Sequence: Synthetic polynucleotide
ccataggctgctgccaccgctgagcaataactagcataaccccttggggcctctaaacgggtcttgaggggttttttgctgaaacctcaggcatttgagaagcacacggtcacactgcttccggtagtcaataaaccggtaaaccagcaatagacataagcggctatttaacgaccctgccctgaaccgacgaccgggtcatcgtggccggatcttgcggcccctcggcttgaacgaattgttagacattatttgccgactaccttggtgatctcgcctttcacgtagtggacaaattcttccaactgatctgcgcgcgaggccaagcgatcttcttcttgtccaagataagcctgtctagcttcaagtatgacgggctgatactgggccggcaggcgctccattgcccagtcggcagcgacatccttcggcgcgattttgccggttactgcgctgtaccaaatgcgggacaacgtaagcactacatttcgctcatcgccagcccagtcgggcggcgagttccatagcgttaaggtttcatttagcgcctcaaatagatcctgttcaggaaccggatcaaagagttcctccgccgctggacctaccaaggcaacgctatgttctcttgcttttgtcagcaagatagccagatcaatgtcgatcgtggctggctcgaagatacctgcaagaatgtcattgcgctgccattctccaaattgcagttcgcgcttagctggataacgccacggaatgatgtcgtcgtgcacaacaatggtgacttctacagcgcggagaatctcgctctctccaggggaagccgaagtttccaaaaggtcgttgatcaaagctcgccgcgttgtttcatcaagccttacggtcaccgtaaccagcaaatcaatatcactgtgtggcttcaggccgccatccactgcggagccgtacaaatgtacggccagcaacgtcggttcgagatggcgctcgatgacgccaactacctctgatagttgagtcgatacttcggcgatcaccgcttccctcatactcttcctttttcaatattattgaagcatttatcagggttattgtctcatgagcggatacatatttgaatgtatttagaaaaataaacaaatagctagctcactcggtcgctacgctccgggcgtgagactgcggcgggcgctgcggacacatacaaagttacccacagattccgtggataagcaggggactaacatgtgaggcaaaacagcagggccgcgccggtggcgtttttccataggctccgccctcctgccagagttcacataaacagacgcttttccggtgcatctgtgggagccgtgaggctcaaccatgaatctgacagtacgggcgaaacccgacaggacttaaagatccccaccgtttccggcgggtcgctccctcttgcgctctcctgttccgaccctgccgtttaccggatacctgttccgcctttctcccttacgggaagtgtggcgctttctcatagctcacacactggtatctcggctcggtgtaggtcgttcgctccaagctgggctgtaagcaagaactccccgttcagcccgactgctgcgccttatccggtaactgttcacttgagtccaacccggaaaagcacggtaaaacgccactggcagcagccattggtaactgggagttcgcagaggatttgtttagctaaacacgcggttgctcttgaagtgtgcgccaaagtccggctacactggaaggacagatttggttgctgtgctctgcgaaagccagttaccacggttaagcagttccccaactgacttaaccttcgatcaaaccacctccccaggtggttttttcgtttacagggcaaaagattacgcgcagaaaaaaaggatctcaagaagatcctttgatcttttctactgaaccgctctagatttcagtgcaatttatctcttcaaatgtagcacctgaagtcagccccatacgatataagttgtaattctcatgttagtcatgccccgcgcccaccggaaggagctgactgggttgaaggctctcaagggcatcggtcgagatcccggtgcctaatgagtgagctaacttacattaattgcgttgcgctcactgcccgctttccagtcgggaaacctgtcgtgccagctgcattaatgaatcggccaacgcgcggggagaggcggtttgcgtattgggcgccagggtggtttttcttttcaccagtgagacgggcaacagctgattgcccttcaccgcctggccctgagagagttgcagcaagcggtccacgctggtttgccccagcaggcgaaaatcctgtttgatggtggttaacggcgggatataacatgagctgtcttcggtatcgtcgtatcccactaccgagatgtccgcaccaacgcgcagcccggactcggtaatggcgcgcattgcgcccagcgccatctgatcgttggcaaccagcatcgcagtgggaacgatgccctcattcagcatttgcatggtttgttgaaaaccggacatggcactccagtcgccttcccgttccgctatcggctgaatttgattgcgagtgagatatttatgccagccagccagacgcagacgcgccgagacagaacttaatgggcccgctaacagcgcgatttgctggtgacccaatgcgaccagatgctccacgcccagtcgcgtaccgtcttcatgggagaaaataatactgttgatgggtgtctggtcagagacatcaagaaataacgccggaacattagtgcaggcagcttccacagcaatggcatcctggtcatccagcggatagttaatgatcagcccactgacgcgttgcgcgagaagattgtgcaccgccgctttacaggcttcgacgccgcttcgttctaccatcgacaccaccacgctggcacccagttgatcggcgcgagatttaatcgccgcgacaatttgcgacggcgcgtgcagggccagactggaggtggcaacgccaatcagcaacgactgtttgcccgccagttgttgtgccacgcggttgggaatgtaattcagctccgccatcgccgcttccactttttcccgcgttttcgcagaaacgtggctggcctggttcaccacgcgggaaacggtctgataagagacaccggcatactctgcgacatcgtataacgttactggtttcacattcaccaccctgaattgactctcttccgggcgctatcatgccataccgcgaaaggttttgcgccattcgatggtgtccgggatctcgacgctctcccttatgcgactcctgcattaggaaattaatacgactcactataggggaattgtgagcggataacaattcccctgtagccgggtgaactgccgtataggcagccaagaaaaggactggaagaaatcatccaagttggggactgtgaactgccgtataggcagccaagatt

SEQ ID NO: 5633 - DNA, 3476 bp, Artificial Sequence
  Description of Artificial Sequence: Synthetic polynucleotide
ccataggctgctgccaccgctgagcaataactagcataaccccttggggcctctaaacgggtcttgaggggttttttgctgaaacctcaggcatttgagaagcacacggtcacactgcttccggtagtcaataaaccggtaaaccagcaatagacataagcggctatttaacgaccctgccctgaaccgacgaccgggtcatcgtggccggatcttgcggcccctcggcttgaacgaattgttagacattatttgccgactaccttggtgatctcgcctttcacgtagtggacaaattcttccaactgatctgcgcgcgaggccaagcgatcttcttcttgtccaagataagcctgtctagcttcaagtatgacgggctgatactgggccggcaggcgctccattgcccagtcggcagcgacatccttcggcgcgattttgccggttactgcgctgtaccaaatgcgggacaacgtaagcactacatttcgctcatcgccagcccagtcgggcggcgagttccatagcgttaaggtttcatttagcgcctcaaatagatcctgttcaggaaccggatcaaagagttcctccgccgctggacctaccaaggcaacgctatgttctcttgcttttgtcagcaagatagccagatcaatgtcgatcgtggctggctcgaagatacctgcaagaatgtcattgcgctgccattctccaaattgcagttcgcgcttagctggataacgccacggaatgatgtcgtcgtgcacaacaatggtgacttctacagcgcggagaatctcgctctctccaggggaagccgaagtttccaaaaggtcgttgatcaaagctcgccgcgttgtttcatcaagccttacggtcaccgtaaccagcaaatcaatatcactgtgtggcttcaggccgccatccactgcggagccgtacaaatgtacggccagcaacgtcggttcgagatggcgctcgatgacgccaactacctctgatagttgagtcgatacttcggcgatcaccgcttccctcatactcttcctttttcaatattattgaagcatttatcagggttattgtctcatgagcggatacatatttgaatgtatttagaaaaataaacaaatagctagctcactcggtcgctacgctccgggcgtgagactgcggcgggcgctgcggacacatacaaagttacccacagattccgtggataagcaggggactaacatgtgaggcaaaacagcagggccgcgccggtggcgtttttccataggctccgccctcctgccagagttcacataaacagacgcttttccggtgcatctgtgggagccgtgaggctcaaccatgaatctgacagtacgggcgaaacccgacaggacttaaagatccccaccgtttccggcgggtcgctccctcttgcgctctcctgttccgaccctgccgtttaccggatacctgttccgcctttctcccttacgggaagtgtggcgctttctcatagctcacacactggtatctcggctcggtgtaggtcgttcgctccaagctgggctgtaagcaagaactccccgttcagcccgactgctgcgccttatccggtaactgttcacttgagtccaacccggaaaagcacggtaaaacgccactggcagcagccattggtaactgggagttcgcagaggatttgtttagctaaacacgcggttgctcttgaagtgtgcgccaaagtccggctacactggaaggacagatttggttgctgtgctctgcgaaagccagttaccacggttaagcagttccccaactgacttaaccttcgatcaaaccacctccccaggtggttttttcgtttacagggcaaaagattacgcgcagaaaaaaaggatctcaagaagatcctttgatcttttctactgaaccgctctagatttcagtgcaatttatctcttcaaatgtagcacctgaagtcagccccatacgatataagttgtaattctcatgttagtcatgccccgcgcccaccggaaggagctgactgggttgaaggctctcaagggcatcggtcgagatcccggtgcctaatgagtgagctaacttacattaattgcgttgcgctcactgcccgctttccagtcgggaaacctgtcgtgccagctgcattaatgaatcggccaacgcgcggggagaggcggtttgcgtattgggcgccagggtggtttttcttttcaccagtgagacgggcaacagctgattgcccttcaccgcctggccctgagagagttgcagcaagcggtccacgctggtttgccccagcaggcgaaaatcctgtttgatggtggttaacggcgggatataacatgagctgtcttcggtatcgtcgtatcccactaccgagatgtccgcaccaacgcgcagcccggactcggtaatggcgcgcattgcgcccagcgccatctgatcgttggcaaccagcatcgcagtgggaacgatgccctcattcagcatttgcatggtttgttgaaaaccggacatggcactccagtcgccttcccgttccgctatcggctgaatttgattgcgagtgagatatttatgccagccagccagacgcagacgcgccgagacagaacttaatgggcccgctaacagcgcgatttgctggtgacccaatgcgaccagatgctccacgcccagtcgcgtaccgtcttcatgggagaaaataatactgttgatgggtgtctggtcagagacatcaagaaataacgccggaacattagtgcaggcagcttccacagcaatggcatcctggtcatccagcggatagttaatgatcagcccactgacgcgttgcgcgagaagattgtgcaccgccgctttacaggcttcgacgccgcttcgttctaccatcgacaccaccacgctggcacccagttgatcggcgcgagatttaatcgccgcgacaatttgcgacggcgcgtgcagggccagactggaggtggcaacgccaatcagcaacgactgtttgcccgccagttgttgtgccacgcggttgggaatgtaattcagctccgccatcgccgcttccactttttcccgcgttttcgcagaaacgtggctggcctggttcaccacgcgggaaacggtctgataagagacaccggcatactctgcgacatcgtataacgttactggtttcacattcaccaccctgaattgactctcttccgggcgctatcatgccataccgcgaaaggttttgcgccattcgatggtgtccgggatctcgacgctctcccttatgcgactcctgcattaggaaattaatacgactcactataggggaattgtgagcggataacaattcccctgtagccgggtgaactgccgtataggcagccaagattaggactggaagaaatcatccaagttggggactattttctgccgtaaaggcagatattatt

SEQ ID NO: 5634 - DNA, 3476 bp, Artificial Sequence
  Description of Artificial Sequence: Synthetic polynucleotide
ccataggctgctgccaccgctgagcaataactagcataaccccttggggcctctaaacgggtcttgaggggttttttgctgaaacctcaggcatttgagaagcacacggtcacactgcttccggtagtcaataaaccggtaaaccagcaatagacataagcggctatttaacgaccctgccctgaaccgacgaccgggtcatcgtggccggatcttgcggcccctcggcttgaacgaattgttagacattatttgccgactaccttggtgatctcgcctttcacgtagtggacaaattcttccaactgatctgcgcgcgaggccaagcgatcttcttcttgtccaagataagcctgtctagcttcaagtatgacgggctgatactgggccggcaggcgctccattgcccagtcggcagcgacatccttcggcgcgattttgccggttactgcgctgtaccaaatgcgggacaacgtaagcactacatttcgctcatcgccagcccagtcgggcggcgagttccatagcgttaaggtttcatttagcgcctcaaatagatcctgttcaggaaccggatcaaagagttcctccgccgctggacctaccaaggcaacgctatgttctcttgcttttgtcagcaagatagccagatcaatgtcgatcgtggctggctcgaagatacctgcaagaatgtcattgcgctgccattctccaaattgcagttcgcgcttagctggataacgccacggaatgatgtcgtcgtgcacaacaatggtgacttctacagcgcggagaatctcgctctctccaggggaagccgaagtttccaaaaggtcgttgatcaaagctcgccgcgttgtttcatcaagccttacggtcaccgtaaccagcaaatcaatatcactgtgtggcttcaggccgccatccactgcggagccgtacaaatgtacggccagcaacgtcggttcgagatggcgctcgatgacgccaactacctctgatagttgagtcgatacttcggcgatcaccgcttccctcatactcttcctttttcaatattattgaagcatttatcagggttattgtctcatgagcggatacatatttgaatgtatttagaaaaataaacaaatagctagctcactcggtcgctacgctccgggcgtgagactgcggcgggcgctgcggacacatacaaagttacccacagattccgtggataagcaggggactaacatgtgaggcaaaacagcagggccgcgccggtggcgtttttccataggctccgccctcctgccagagttcacataaacagacgcttttccggtgcatctgtgggagccgtgaggctcaaccatgaatctgacagtacgggcgaaacccgacaggacttaaagatccccaccgtttccggcgggtcgctccctcttgcgctctcctgttccgaccctgccgtttaccggatacctgttccgcctttctcccttacgggaagtgtggcgctttctcatagctcacacactggtatctcggctcggtgtaggtcgttcgctccaagctgggctgtaagcaagaactccccgttcagcccgactgctgcgccttatccggtaactgttcacttgagtccaacccggaaaagcacggtaaaacgccactggcagcagccattggtaactgggagttcgcagaggatttgtttagctaaacacgcggttgctcttgaagtgtgcgccaaagtccggctacactggaaggacagatttggttgctgtgctctgcgaaagccagttaccacggttaagcagttccccaactgacttaaccttcgatcaaaccacctccccaggtggttttttcgtttacagggcaaaagattacgcgcagaaaaaaaggatctcaagaagatcctttgatcttttctactgaaccgctctagatttcagtgcaatttatctcttcaaatgtagcacctgaagtcagccccatacgatataagttgtaattctcatgttagtcatgccccgcgcccaccggaaggagctgactgggttgaaggctctcaagggcatcggtcgagatcccggtgcctaatgagtgagctaacttacattaattgcgttgcgctcactgcccgctttccagtcgggaaacctgtcgtgccagctgcattaatgaatcggccaacgcgcggggagaggcggtttgcgtattgggcgccagggtggtttttcttttcaccagtgagacgggcaacagctgattgcccttcaccgcctggccctgagagagttgcagcaagcggtccacgctggtttgccccagcaggcgaaaatcctgtttgatggtggttaacggcgggatataacatgagctgtcttcggtatcgtcgtatcccactaccgagatgtccgcaccaacgcgcagcccggactcggtaatggcgcgcattgcgcccagcgccatctgatcgttggcaaccagcatcgcagtgggaacgatgccctcattcagcatttgcatggtttgttgaaaaccggacatggcactccagtcgccttcccgttccgctatcggctgaatttgattgcgagtgagatatttatgccagccagccagacgcagacgcgccgagacagaacttaatgggcccgctaacagcgcgatttgctggtgacccaatgcgaccagatgctccacgcccagtcgcgtaccgtcttcatgggagaaaataatactgttgatgggtgtctggtcagagacatcaagaaataacgccggaacattagtgcaggcagcttccacagcaatggcatcctggtcatccagcggatagttaatgatcagcccactgacgcgttgcgcgagaagattgtgcaccgccgctttacaggcttcgacgccgcttcgttctaccatcgacaccaccacgctggcacccagttgatcggcgcgagatttaatcgccgcgacaatttgcgacggcgcgtgcagggccagactggaggtggcaacgccaatcagcaacgactgtttgcccgccagttgttgtgccacgcggttgggaatgtaattcagctccgccatcgccgcttccactttttcccgcgttttcgcagaaacgtggctggcctggttcaccacgcgggaaacggtctgataagagacaccggcatactctgcgacatcgtataacgttactggtttcacattcaccaccctgaattgactctcttccgggcgctatcatgccataccgcgaaaggttttgcgccattcgatggtgtccgggatctcgacgctctcccttatgcgactcctgcattaggaaattaatacgactcactataggggaattgtgagcggataacaattcccctgtagccgggtgaactgccgagtaggtagctgataacaaacgaaccaccttcattcgagtacaagagcagtgaactgccgagtaggtagctgataac

SEQ ID NO: 5635 - DNA, 3476 bp, Artificial Sequence
  Description of Artificial Sequence: Synthetic polynucleotide
ccataggctgctgccaccgctgagcaataactagcataaccccttggggcctctaaacgggtcttgaggggttttttgctgaaacctcaggcatttgagaagcacacggtcacactgcttccggtagtcaataaaccggtaaaccagcaatagacataagcggctatttaacgaccctgccctgaaccgacgaccgggtcatcgtggccggatcttgcggcccctcggcttgaacgaattgttagacattatttgccgactaccttggtgatctcgcctttcacgtagtggacaaattcttccaactgatctgcgcgcgaggccaagcgatcttcttcttgtccaagataagcctgtctagcttcaagtatgacgggctgatactgggccggcaggcgctccattgcccagtcggcagcgacatccttcggcgcgattttgccggttactgcgctgtaccaaatgcgggacaacgtaagcactacatttcgctcatcgccagcccagtcgggcggcgagttccatagcgttaaggtttcatttagcgcctcaaatagatcctgttcaggaaccggatcaaagagttcctccgccgctggacctaccaaggcaacgctatgttctcttgcttttgtcagcaagatagccagatcaatgtcgatcgtggctggctcgaagatacctgcaagaatgtcattgcgctgccattctccaaattgcagttcgcgcttagctggataacgccacggaatgatgtcgtcgtgcacaacaatggtgacttctacagcgcggagaatctcgctctctccaggggaagccgaagtttccaaaaggtcgttgatcaaagctcgccgcgttgtttcatcaagccttacggtcaccgtaaccagcaaatcaatatcactgtgtggcttcaggccgccatccactgcggagccgtacaaatgtacggccagcaacgtcggttcgagatggcgctcgatgacgccaactacctctgatagttgagtcgatacttcggcgatcaccgcttccctcatactcttcctttttcaatattattgaagcatttatcagggttattgtctcatgagcggatacatatttgaatgtatttagaaaaataaacaaatagctagctcactcggtcgctacgctccgggcgtgagactgcggcgggcgctgcggacacatacaaagttacccacagattccgtggataagcaggggactaacatgtgaggcaaaacagcagggccgcgccggtggcgtttttccataggctccgccctcctgccagagttcacataaacagacgcttttccggtgcatctgtgggagccgtgaggctcaaccatgaatctgacagtacgggcgaaacccgacaggacttaaagatccccaccgtttccggcgggtcgctccctcttgcgctctcctgttccgaccctgccgtttaccggatacctgttccgcctttctcccttacgggaagtgtggcgctttctcatagctcacacactggtatctcggctcggtgtaggtcgttcgctccaagctgggctgtaagcaagaactccccgttcagcccgactgctgcgccttatccggtaactgttcacttgagtccaacccggaaaagcacggtaaaacgccactggcagcagccattggtaactgggagttcgcagaggatttgtttagctaaacacgcggttgctcttgaagtgtgcgccaaagtccggctacactggaaggacagatttggttgctgtgctctgcgaaagccagttaccacggttaagcagttccccaactgacttaaccttcgatcaaaccacctccccaggtggttttttcgtttacagggcaaaagattacgcgcagaaaaaaaggatctcaagaagatcctttgatcttttctactgaaccgctctagatttcagtgcaatttatctcttcaaatgtagcacctgaagtcagccccatacgatataagttgtaattctcatgttagtcatgccccgcgcccaccggaaggagctgactgggttgaaggctctcaagggcatcggtcgagatcccggtgcctaatgagtgagctaacttacattaattgcgttgcgctcactgcccgctttccagtcgggaaacctgtcgtgccagctgcattaatgaatcggccaacgcgcggggagaggcggtttgcgtattgggcgccagggtggtttttcttttcaccagtgagacgggcaacagctgattgcccttcaccgcctggccctgagagagttgcagcaagcggtccacgctggtttgccccagcaggcgaaaatcctgtttgatggtggttaacggcgggatataacatgagctgtcttcggtatcgtcgtatcccactaccgagatgtccgcaccaacgcgcagcccggactcggtaatggcgcgcattgcgcccagcgccatctgatcgttggcaaccagcatcgcagtgggaacgatgccctcattcagcatttgcatggtttgttgaaaaccggacatggcactccagtcgccttcccgttccgctatcggctgaatttgattgcgagtgagatatttatgccagccagccagacgcagacgcgccgagacagaacttaatgggcccgctaacagcgcgatttgctggtgacccaatgcgaccagatgctccacgcccagtcgcgtaccgtcttcatgggagaaaataatactgttgatgggtgtctggtcagagacatcaagaaataacgccggaacattagtgcaggcagcttccacagcaatggcatcctggtcatccagcggatagttaatgatcagcccactgacgcgttgcgcgagaagattgtgcaccgccgctttacaggcttcgacgccgcttcgttctaccatcgacaccaccacgctggcacccagttgatcggcgcgagatttaatcgccgcgacaatttgcgacggcgcgtgcagggccagactggaggtggcaacgccaatcagcaacgactgtttgcccgccagttgttgtgccacgcggttgggaatgtaattcagctccgccatcgccgcttccactttttcccgcgttttcgcagaaacgtggctggcctggttcaccacgcgggaaacggtctgataagagacaccggcatactctgcgacatcgtataacgttactggtttcacattcaccaccctgaattgactctcttccgggcgctatcatgccataccgcgaaaggttttgcgccattcgatggtgtccgggatctcgacgctctcccttatgcgactcctgcattaggaaattaatacgactcactataggggaattgtgagcggataacaattcccctgtagccggtcattactactgcaaagtagctgataacaaacgaaccaccttcattcgagtacaagagcactttactgctgaataagtagataactac

SEQ ID NO: 5636 - DNA, 5689 bp, Artificial Sequence
  Description of Artificial Sequence: Synthetic polynucleotide
gcaaactattaactggcgaactacttactctagcttcccggcaacaattaatagactggatggaggcggataaagttgcaggaccacttctgcgctcggcccttccggctggctggtttattgctgataaatctggagccggtgagcgtgggtctcgcggtatcattgcagcactggggccagatggtaagccctcccgtatcgtagttatctacacgacggggagtcaggcaactatggatgaacgaaatagacagatcgctgagataggtgcctcactgattaagcattggtaactgtcagaccaagtttactcatatatactttagattgatttacgcgccctgtagcggcgcattaagcgcggcgggtgtggtggttacgcgcagcgtgaccgctacacttgccagcgccctagcgcccgctcctttcgctttcttcccttcctttctcgccacgttcgccggctttccccgtcaagctctaaatcgggggctccctttagggttccgatttagtgctttacggcacctcgaccccaaaaaacttgatttgggtgatggttcacgtagtgggccatcgccctgatagacggtttttcgccctttgacgttggagtccacgttctttaatagtggactcttgttccaaacttgaacaacactcaaccctatctcgggctattcttttgatttataagggattttgccgatttcggcctattggttaaaaaatgagctgatttaacaaaaatttaacgcgaattttaacaaaatattaacgtttacaatttaaaaggatctaggtgaagatcctttttgataatctcatgaccaaaatcccttaacgtgagttttcgttccactgagcgtcagaccccgtagaaaagatcaaaggatcttcttgagatcctttttttctgcgcgtaatctgctgcttgcaaacaaaaaaaccaccgctaccagcggtggtttgtttgccggatcaagagctaccaactctttttccgaaggtaactggcttcagcagagcgcagataccaaatactgtccttctagtgtagccgtagttaggccaccacttcaagaactctgtagcaccgcctacatacctcgctctgctaatcctgttaccagtcaggcatttgagaagcacacggtcacactgcttccggtagtcaataaaccggtaaaccagcaatagacataagcggctatttaacgaccctgccctgaaccgacgaccgggtcgaatttgctttcgaatttctgccattcatccgcttattatcacttattcaggcgtagcaccaggcgtttaagggcaccaataactgccttaaaaaaattacgccccgccctgccactcatcgcagtactgttgtaattcattaagcattctgccgacatggaagccatcacagacggcatgatgaacctgaatcgccagcggcatcagcaccttgtcgccttgcgtataatatttgcccatggtgaaaacgggggcgaagaagttgtccatattggccacgtttaaatcaaaactggtgaaactcacccagggattggctgagacgaaaaacatattctcaataaaccctttagggaaataggccaggttttcaccgtaacacgccacatcttgcgaatatatgtgtagaaactgccggaaatcgtcgtggtattcactccagagcgatgaaaacgtttcagtttgctcatggaaaacggtgtaacaagggtgaacactatcccatatcaccagctcaccgtctttcattgccatacggaattccggatgagcattcatcaggcgggcaagaatgtgaataaaggccggataaaacttgtgcttatttttctttacggtctttaaaaaggccgtaatatccagctgaacggtctggttataggtacattgagcaactgactgaaatgcctcaaaatgttctttacgatgccattgggatatatcaacggtggtatatccagtgatttttttctccattttagcttccttagctcctgaaaatctcgataactcaaaaaatacgcccggtagtgatcttatttcattatggtgaaagttggaacctcttacgtgccgatcaacgtctcattttcgccaaaagttggcccagggcttcccggtatcaacagggacaccaggatttatttattctgcgaagtgatcttccgtcacaggtatttattcggcgcaaagtgcgtcgggtgatgctgccaacttactgatttagtgtatgatggtgtttttgaggtgctccagtggcttctgtttctatcagctgtccctcctgttcagctactgacggggtggtgcgtaacggcaaaagcaccgccggacatcagcgctagcggagtgtatactggcttactatgttggcactgatgagggtgtcagtgaagtgcttcatgtggcaggagaaaaaaggctgcaccggtgcgtcagcagaatatgtgatacaggatatattccgcttcctcgctcactgactcgctacgctcggtcgttcgactgcggcgagcggaaatggcttacgaacggggcggagatttcctggaagatgccaggaagatacttaacagggaagtgagagggccgcggcaaagccgtttttccataggctccgcccccctgacaagcatcacgaaatctgacgctcaaatcagtggtggcgaaacccgacaggactataaagataccaggcgtttccccctggcggctccctcgtgcgctctcctgttcctgcctttcggtttaccggtgtcattccgctgttatggccgcgtttgtctcattccacgcctgacactcagttccgggtaggcagttcgctccaagctggactgtatgcacgaaccccccgttcagtccgaccgctgcgccttatccggtaactatcgtcttgagtccaacccggaaagacatgcaaaagcaccactggcagcagccactggtaattgatttagaggagttagtcttgaagtcatgcgccggttaaggctaaactgaaaggacaagttttggtgactgcgctcctccaagccagttacctcggttcaaagagttggtagctcagagaaccttcgaaaaaccgccctgcaaggcggttttttcgttttcagagcaagagattacgcgcagaccaaaacgatctcaagaagatcatcttattaatcagataaaatatttgctcatgagcccgaagtggcgagcccgatcttccccatcggtgatgtcggcgatataggcgccagcaaccgcacctgtggcgccggtgatgccggccacgatgcgtccggcgtagaggatctgctcatgtttgacagcttatcatcgatgcataatgtgcctgtcaaatggacgaagcagggattctgcaaaccctatgctactccgtcaagccgtcaattgtctgattcgttaccaattatgacaacttgacggctacatcattcactttttcttcacaaccggcacggaactcgctcgggctggccccggtgcattttttaaatacccgcgagaaatagagttgatcgtcaaaaccaacattgcgaccgacggtggcgataggcatccgggtggtgctcaaaagcagcttcgcctggctgatacgttggtcctcgcgccagcttaagacgctaatccctaactgctggcggaaaagatgtgacagacgcgacggcgacaagcaaacatgctgtgcgacgctggcgatatcaaaattgctgtctgccaggtgatcgctgatgtactgacaagcctcgcgtacccgattatccatcggtggatggagcgactcgttaatcgcttccatgcgccgcagtaacaattgctcaagcagatttatcgccagcagctccgaatagcgcccttccccttgcccggcgttaatgatttgcccaaacaggtcgctgaaatgcggctggtgcgcttcatccgggcgaaagaaccccgtattggcaaatattgacggccagttaagccattcatgccagtaggcgcgcggacgaaagtaaacccactggtgataccattcgcgagcctccggatgacgaccgtagtgatgaatctctcctggcgggaacagcaaaatatcacccggtcggcaaacaaattctcgtccctgatttttcaccaccccctgaccgcgaatggtgagattgagaatataacctttcattcccagcggtcggtcgataaaaaaatcgagataaccgttggcctcaatcggcgttaaacccgccaccagatgggcattaaacgagtatcccggcagcaggggatcattttgcgcttcagccatacttttcatactcccgccattcagagaagaaaccaattgtccatattgcatcagacattgccgtcactgcgtcttttactggctcttctcgctaaccaaaccggtaaccccgcttattaaaagcattctgtaacaaagcgggaccaaagccatgacaaaaacgcgtaacaaaagtgtctataatcacggcagaaaagtccacattgattatttgcacggcgtcacactttgctatgccatagcatttttatccataagattagcggatcctacctgacgctttttatcgcaactctctactgtttctccatacccgtttttttgggctagcgaattcgagctcggtacccggggatcctctagtctagagtcacacaggactactatatgactaatccattacccattcgccttaaagccgctcgcaaggctactggactgactcaacaacagttaggtatccgcttgggaatggaacaatcaaccgcatctgcccgcatgaaccagtacgagaaagggaaacatgcgcctgactatcaaaccatgcaacgcatcgcccaggagctgggctatcccgttgcgtacttctattgtgatgacgagcttctggcggaactgatctgcatgatggccaaactttccgaggagaaacagcgcgaattgcttcaacagttgagtgtaactgaatatgcagagtcgcgtgactcggcagagtaagcttggctgttttggcggatgagagaagattttcagcctgatacagattaaatcagaacgcagaagcggtctgataaaacagaatttgcctggcggcagtagcgcggtggtcccacctgaccccatgccgaactcagaagtgaaacgccgtagcgccgatggtagtgtggggtctccccatgcgagagtagggaactgccaggcatcaaataaaacgaaaggctcagtcgaaagactgggcctttcgttttatctgttgtttgtcggtgaacgctctcctgagtaggacaaatccgccgggagcggatttgaacgttgcgaagcaacggcccggagggtggcgggcaggacgcccgccataaactgccaggcatcaaattaagcagaaggccatcctgacggatggcctttttgcgtttctacaaactcttttgtttatttttctaaatacattcaaatatgtatccgctcatgagacaataaccctgataaatgcttcaataatattgaaaaaggaagagtatgagtattcaacatttccgtgtcgcccttattcccttttttgcggcattttgccttcctgtttttgctcacccagaaacgctggtgaaagtaaaagatgctgaagatcagttgggtgca

SEQ ID NO: 5637 - DNA, 5664 bp, Artificial Sequence
  Description of Artificial Sequence: Synthetic polynucleotide
gcaaactattaactggcgaactacttactctagcttcccggcaacaattaatagactggatggaggcggataaagttgcaggaccacttctgcgctcggcccttccggctggctggtttattgctgataaatctggagccggtgagcgtgggtctcgcggtatcattgcagcactggggccagatggtaagccctcccgtatcgtagttatctacacgacggggagtcaggcaactatggatgaacgaaatagacagatcgctgagataggtgcctcactgattaagcattggtaactgtcagaccaagtttactcatatatactttagattgatttacgcgccctgtagcggcgcattaagcgcggcgggtgtggtggttacgcgcagcgtgaccgctacacttgccagcgccctagcgcccgctcctttcgctttcttcccttcctttctcgccacgttcgccggctttccccgtcaagctctaaatcgggggctccctttagggttccgatttagtgctttacggcacctcgaccccaaaaaacttgatttgggtgatggttcacgtagtgggccatcgccctgatagacggtttttcgccctttgacgttggagtccacgttctttaatagtggactcttgttccaaacttgaacaacactcaaccctatctcgggctattcttttgatttataagggattttgccgatttcggcctattggttaaaaaatgagctgatttaacaaaaatttaacgcgaattttaacaaaatattaacgtttacaatttaaaaggatctaggtgaagatcctttttgataatctcatgaccaaaatcccttaacgtgagttttcgttccactgagcgtcagaccccgtagaaaagatcaaaggatcttcttgagatcctttttttctgcgcgtaatctgctgcttgcaaacaaaaaaaccaccgctaccagcggtggtttgtttgccggatcaagagctaccaactctttttccgaaggtaactggcttcagcagagcgcagataccaaatactgtccttctagtgtagccgtagttaggccaccacttcaagaactctgtagcaccgcctacatacctcgctctgctaatcctgttaccagtcaggcatttgagaagcacacggtcacactgcttccggtagtcaataaaccggtaaaccagcaatagacataagcggctatttaacgaccctgccctgaaccgacgaccgggtcgaatttgctttcgaatttctgccattcatccgcttattatcacttattcaggcgtagcaccaggcgtttaagggcaccaataactgccttaaaaaaattacgccccgccctgccactcatcgcagtactgttgtaattcattaagcattctgccgacatggaagccatcacagacggcatgatgaacctgaatcgccagcggcatcagcaccttgtcgccttgcgtataatatttgcccatggtgaaaacgggggcgaagaagttgtccatattggccacgtttaaatcaaaactggtgaaactcacccagggattggctgagacgaaaaacatattctcaataaaccctttagggaaataggccaggttttcaccgtaacacgccacatcttgcgaatatatgtgtagaaactgccggaaatcgtcgtggtattcactccagagcgatgaaaacgtttcagtttgctcatggaaaacggtgtaacaagggtgaacactatcccatatcaccagctcaccgtctttcattgccatacggaattccggatgagcattcatcaggcgggcaagaatgtgaataaaggccggataaaacttgtgcttatttttctttacggtctttaaaaaggccgtaatatccagctgaacggtctggttataggtacattgagcaactgactgaaatgcctcaaaatgttctttacgatgccattgggatatatcaacggtggtatatccagtgatttttttctccattttagcttccttagctcctgaaaatctcgataactcaaaaaatacgcccggtagtgatcttatttcattatggtgaaagttggaacctcttacgtgccgatcaacgtctcattttcgccaaaagttggcccagggcttcccggtatcaacagggacaccaggatttatttattctgcgaagtgatcttccgtcacaggtatttattcggcgcaaagtgcgtcgggtgatgctgccaacttactgatttagtgtatgatggtgtttttgaggtgctccagtggcttctgtttctatcagctgtccctcctgttcagctactgacggggtggtgcgtaacggcaaaagcaccgccggacatcagcgctagcggagtgtatactggcttactatgttggcactgatgagggtgtcagtgaagtgcttcatgtggcaggagaaaaaaggctgcaccggtgcgtcagcagaatatgtgatacaggatatattccgcttcctcgctcactgactcgctacgctcggtcgttcgactgcggcgagcggaaatggcttacgaacggggcggagatttcctggaagatgccaggaagatacttaacagggaagtgagagggccgcggcaaagccgtttttccataggctccgcccccctgacaagcatcacgaaatctgacgctcaaatcagtggtggcgaaacccgacaggactataaagataccaggcgtttccccctggcggctccctcgtgcgctctcctgttcctgcctttcggtttaccggtgtcattccgctgttatggccgcgtttgtctcattccacgcctgacactcagttccgggtaggcagttcgctccaagctggactgtatgcacgaaccccccgttcagtccgaccgctgcgccttatccggtaactatcgtcttgagtccaacccggaaagacatgcaaaagcaccactggcagcagccactggtaattgatttagaggagttagtcttgaagtcatgcgccggttaaggctaaactgaaaggacaagttttggtgactgcgctcctccaagccagttacctcggttcaaagagttggtagctcagagaaccttcgaaaaaccgccctgcaaggcggttttttcgttttcagagcaagagattacgcgcagaccaaaacgatctcaagaagatcatcttattaatcagataaaatatttgctcatgagcccgaagtggcgagcccgatcttccccatcggtgatgtcggcgatataggcgccagcaaccgcacctgtggcgccggtgatgccggccacgatgcgtccggcgtagaggatctgctcatgtttgacagcttatcatcgatgcataatgtgcctgtcaaatggacgaagcagggattctgcaaaccctatgctactccgtcaagccgtcaattgtctgattcgttaccaattatgacaacttgacggctacatcattcactttttcttcacaaccggcacggaactcgctcgggctggccccggtgcattttttaaatacccgcgagaaatagagttgatcgtcaaaaccaacattgcgaccgacggtggcgataggcatccgggtggtgctcaaaagcagcttcgcctggctgatacgttggtcctcgcgccagcttaagacgctaatccctaactgctggcggaaaagatgtgacagacgcgacggcgacaagcaaacatgctgtgcgacgctggcgatatcaaaattgctgtctgccaggtgatcgctgatgtactgacaagcctcgcgtacccgattatccatcggtggatggagcgactcgttaatcgcttccatgcgccgcagtaacaattgctcaagcagatttatcgccagcagctccgaatagcgcccttccccttgcccggcgttaatgatttgcccaaacaggtcgctgaaatgcggctggtgcgcttcatccgggcgaaagaaccccgtattggcaaatattgacggccagttaagccattcatgccagtaggcgcgcggacgaaagtaaacccactggtgataccattcgcgagcctccggatgacgaccgtagtgatgaatctctcctggcgggaacagcaaaatatcacccggtcggcaaacaaattctcgtccctgatttttcaccaccccctgaccgcgaatggtgagattgagaatataacctttcattcccagcggtcggtcgataaaaaaatcgagataaccgttggcctcaatcggcgttaaacccgccaccagatgggcattaaacgagtatcccggcagcaggggatcattttgcgcttcagccatacttttcatactcccgccattcagagaagaaaccaattgtccatattgcatcagacattgccgtcactgcgtcttttactggctcttctcgctaaccaaaccggtaaccccgcttattaaaagcattctgtaacaaagcgggaccaaagccatgacaaaaacgcgtaacaaaagtgtctataatcacggcagaaaagtccacattgattatttgcacggcgtcacactttgctatgccatagcatttttatccataagattagcggatcctacctgacgctttttatcgcaactctctactgtttctccatacccgtttttttgggctagcgaattcgagctcggtacccggggatcctctagtctagagtcacacaggactactatatgcagaaggataaccccatcccggcgaggctcaaagctgcgcgtaaaaaagccaagatcacccaaaaagatttaggggtgaaaattggtatggaacaaagttctgctagcggtcgtatgaatcattacgagaaaggcaggcatgtacctgatattggtacgcttgagcgcatggctgaagagttagatgtgccgctaaactactttttctgtaggagcgaattgagcgctgagttagcgtgcgcaattgataagatgagtgatgaagagaaggcggtgttgttggaaaagctgagaagttaaaagcttggctgttttggcggatgagagaagattttcagcctgatacagattaaatcagaacgcagaagcggtctgataaaacagaatttgcctggcggcagtagcgcggtggtcccacctgaccccatgccgaactcagaagtgaaacgccgtagcgccgatggtagtgtggggtctccccatgcgagagtagggaactgccaggcatcaaataaaacgaaaggctcagtcgaaagactgggcctttcgttttatctgttgtttgtcggtgaacgctctcctgagtaggacaaatccgccgggagcggatttgaacgttgcgaagcaacggcccggagggtggcgggcaggacgcccgccataaactgccaggcatcaaattaagcagaaggccatcctgacggatggcctttttgcgtttctacaaactcttttgtttatttttctaaatacattcaaatatgtatccgctcatgagacaataaccctgataaatgcttcaataatattgaaaaaggaagagtatgagtattcaacatttccgtgtcgcccttattcccttttttgcggcattttgccttcctgtttttgctcacccagaaacgctggtgaaagtaaaagatgctgaagatcagttgggtgca

SEQ ID NO: 5638 - DNA, 5566 bp, Artificial Sequence
  Description of Artificial Sequence: Synthetic polynucleotide
gcaaactattaactggcgaactacttactctagcttcccggcaacaattaatagactggatggaggcggataaagttgcaggaccacttctgcgctcggcccttccggctggctggtttattgctgataaatctggagccggtgagcgtgggtctcgcggtatcattgcagcactggggccagatggtaagccctcccgtatcgtagttatctacacgacggggagtcaggcaactatggatgaacgaaatagacagatcgctgagataggtgcctcactgattaagcattggtaactgtcagaccaagtttactcatatatactttagattgatttacgcgccctgtagcggcgcattaagcgcggcgggtgtggtggttacgcgcagcgtgaccgctacacttgccagcgccctagcgcccgctcctttcgctttcttcccttcctttctcgccacgttcgccggctttccccgtcaagctctaaatcgggggctccctttagggttccgatttagtgctttacggcacctcgaccccaaaaaacttgatttgggtgatggttcacgtagtgggccatcgccctgatagacggtttttcgccctttgacgttggagtccacgttctttaatagtggactcttgttccaaacttgaacaacactcaaccctatctcgggctattcttttgatttataagggattttgccgatttcggcctattggttaaaaaatgagctgatttaacaaaaatttaacgcgaattttaacaaaatattaacgtttacaatttaaaaggatctaggtgaagatcctttttgataatctcatgaccaaaatcccttaacgtgagttttcgttccactgagcgtcagaccccgtagaaaagatcaaaggatcttcttgagatcctttttttctgcgcgtaatctgctgcttgcaaacaaaaaaaccaccgctaccagcggtggtttgtttgccggatcaagagctaccaactctttttccgaaggtaactggcttcagcagagcgcagataccaaatactgtccttctagtgtagccgtagttaggccaccacttcaagaactctgtagcaccgcctacatacctcgctctgctaatcctgttaccagtcaggcatttgagaagcacacggtcacactgcttccggtagtcaataaaccggtaaaccagcaatagacataagcggctatttaacgaccctgccctgaaccgacgaccgggtcgaatttgctttcgaatttctgccattcatccgcttattatcacttattcaggcgtagcaccaggcgtttaagggcaccaataactgccttaaaaaaattacgccccgccctgccactcatcgcagtactgttgtaattcattaagcattctgccgacatggaagccatcacagacggcatgatgaacctgaatcgccagcggcatcagcaccttgtcgccttgcgtataatatttgcccatggtgaaaacgggggcgaagaagttgtccatattggccacgtttaaatcaaaactggtgaaactcacccagggattggctgagacgaaaaacatattctcaataaaccctttagggaaataggccaggttttcaccgtaacacgccacatcttgcgaatatatgtgtagaaactgccggaaatcgtcgtggtattcactccagagcgatgaaaacgtttcagtttgctcatggaaaacggtgtaacaagggtgaacactatcccatatcaccagctcaccgtctttcattgccatacggaattccggatgagcattcatcaggcgggcaagaatgtgaataaaggccggataaaacttgtgcttatttttctttacggtctttaaaaaggccgtaatatccagctgaacggtctggttataggtacattgagcaactgactgaaatgcctcaaaatgttctttacgatgccattgggatatatcaacggtggtatatccagtgatttttttctccattttagcttccttagctcctgaaaatctcgataactcaaaaaatacgcccggtagtgatcttatttcattatggtgaaagttggaacctcttacgtgccgatcaacgtctcattttcgccaaaagttggcccagggcttcccggtatcaacagggacaccaggatttatttattctgcgaagtgatcttccgtcacaggtatttattcggcgcaaagtgcgtcgggtgatgctgccaacttactgatttagtgtatgatggtgtttttgaggtgctccagtggcttctgtttctatcagctgtccctcctgttcagctactgacggggtggtgcgtaacggcaaaagcaccgccggacatcagcgctagcggagtgtatactggcttactatgttggcactgatgagggtgtcagtgaagtgcttcatgtggcaggagaaaaaaggctgcaccggtgcgtcagcagaatatgtgatacaggatatattccgcttcctcgctcactgactcgctacgctcggtcgttcgactgcggcgagcggaaatggcttacgaacggggcggagatttcctggaagatgccaggaagatacttaacagggaagtgagagggccgcggcaaagccgtttttccataggctccgcccccctgacaagcatcacgaaatctgacgctcaaatcagtggtggcgaaacccgacaggactataaagataccaggcgtttccccctggcggctccctcgtgcgctctcctgttcctgcctttcggtttaccggtgtcattccgctgttatggccgcgtttgtctcattccacgcctgacactcagttccgggtaggcagttcgctccaagctggactgtatgcacgaaccccccgttcagtccgaccgctgcgccttatccggtaactatcgtcttgagtccaacccggaaagacatgcaaaagcaccactggcagcagccactggtaattgatttagaggagttagtcttgaagtcatgcgccggttaaggctaaactgaaaggacaagttttggtgactgcgctcctccaagccagttacctcggttcaaagagttggtagctcagagaaccttcgaaaaaccgccctgcaaggcggttttttcgttttcagagcaagagattacgcgcagaccaaaacgatctcaagaagatcatcttattaatcagataaaatatttgctcatgagcccgaagtggcgagcccgatcttccccatcggtgatgtcggcgatataggcgccagcaaccgcacctgtggcgccggtgatgccggccacgatgcgtccggcgtagaggatctgctcatgtttgacagcttatcatcgatgcataatgtgcctgtcaaatggacgaagcagggattctgcaaaccctatgctactccgtcaagccgtcaattgtctgattcgttaccaattatgacaacttgacggctacatcattcactttttcttcacaaccggcacggaactcgctcgggctggccccggtgcattttttaaatacccgcgagaaatagagttgatcgtcaaaaccaacattgcgaccgacggtggcgataggcatccgggtggtgctcaaaagcagcttcgcctggctgatacgttggtcctcgcgccagcttaagacgctaatccctaactgctggcggaaaagatgtgacagacgcgacggcgacaagcaaacatgctgtgcgacgctggcgatatcaaaattgctgtctgccaggtgatcgctgatgtactgacaagcctcgcgtacccgattatccatcggtggatggagcgactcgttaatcgcttccatgcgccgcagtaacaattgctcaagcagatttatcgccagcagctccgaatagcgcccttccccttgcccggcgttaatgatttgcccaaacaggtcgctgaaatgcggctggtgcgcttcatccgggcgaaagaaccccgtattggcaaatattgacggccagttaagccattcatgccagtaggcgcgcggacgaaagtaaacccactggtgataccattcgcgagcctccggatgacgaccgtagtgatgaatctctcctggcgggaacagcaaaatatcacccggtcggcaaacaaattctcgtccctgatttttcaccaccccctgaccgcgaatggtgagattgagaatataacctttcattcccagcggtcggtcgataaaaaaatcgagataaccgttggcctcaatcggcgttaaacccgccaccagatgggcattaaacgagtatcccggcagcaggggatcattttgcgcttcagccatacttttcatactcccgccattcagagaagaaaccaattgtccatattgcatcagacattgccgtcactgcgtcttttactggctcttctcgctaaccaaaccggtaaccccgcttattaaaagcattctgtaacaaagcgggaccaaagccatgacaaaaacgcgtaacaaaagtgtctataatcacggcagaaaagtccacattgattatttgcacggcgtcacactttgctatgccatagcatttttatccataagattagcggatcctacctgacgctttttatcgcaactctctactgtttctccatacccgtttttttgggctagcgaattcgagctcggtacccggggatcctctagtctagagtcacacaggactactatatgagagacttagcaaaaaagtttggctacaacgttcgttctatgcgaaaagacaaaggaatatcacaggataagttggctttggctgcagatatagatcgtagctacgtaggcaggatagaacgaggtgaagtgaatatcacactagaaaaagcctaccagatagcaagtgtccttcagtgcgatattcgagagcttctaccataagcttggctgttttggcggatgagagaagattttcagcctgatacagattaaatcagaacgcagaagcggtctgataaaacagaatttgcctggcggcagtagcgcggtggtcccacctgaccccatgccgaactcagaagtgaaacgccgtagcgccgatggtagtgtggggtctccccatgcgagagtagggaactgccaggcatcaaataaaacgaaaggctcagtcgaaagactgggcctttcgttttatctgttgtttgtcggtgaacgctctcctgagtaggacaaatccgccgggagcggatttgaacgttgcgaagcaacggcccggagggtggcgggcaggacgcccgccataaactgccaggcatcaaattaagcagaaggccatcctgacggatggcctttttgcgtttctacaaactcttttgtttatttttctaaatacattcaaatatgtatccgctcatgagacaataaccctgataaatgcttcaataatattgaaaaaggaagagtatgagtattcaacatttccgtgtcgcccttattcccttttttgcggcattttgccttcctgtttttgctcacccagaaacgctggtgaaagtaaaagatgctgaagatcagttgggtgca

SEQ ID NO: 5639 - DNA, 5566 bp, Artificial Sequence
  Description of Artificial Sequence: Synthetic polynucleotide
gcaaactattaactggcgaactacttactctagcttcccggcaacaattaatagactggatggaggcggataaagttgcaggaccacttctgcgctcggcccttccggctggctggtttattgctgataaatctggagccggtgagcgtgggtctcgcggtatcattgcagcactggggccagatggtaagccctcccgtatcgtagttatctacacgacggggagtcaggcaactatggatgaacgaaatagacagatcgctgagataggtgcctcactgattaagcattggtaactgtcagaccaagtttactcatatatactttagattgatttacgcgccctgtagcggcgcattaagcgcggcgggtgtggtggttacgcgcagcgtgaccgctacacttgccagcgccctagcgcccgctcctttcgctttcttcccttcctttctcgccacgttcgccggctttccccgtcaagctctaaatcgggggctccctttagggttccgatttagtgctttacggcacctcgaccccaaaaaacttgatttgggtgatggttcacgtagtgggccatcgccctgatagacggtttttcgccctttgacgttggagtccacgttctttaatagtggactcttgttccaaacttgaacaacactcaaccctatctcgggctattcttttgatttataagggattttgccgatttcggcctattggttaaaaaatgagctgatttaacaaaaatttaacgcgaattttaacaaaatattaacgtttacaatttaaaaggatctaggtgaagatcctttttgataatctcatgaccaaaatcccttaacgtgagttttcgttccactgagcgtcagaccccgtagaaaagatcaaaggatcttcttgagatcctttttttctgcgcgtaatctgctgcttgcaaacaaaaaaaccaccgctaccagcggtggtttgtttgccggatcaagagctaccaactctttttccgaaggtaactggcttcagcagagcgcagataccaaatactgtccttctagtgtagccgtagttaggccaccacttcaagaactctgtagcaccgcctacatacctcgctctgctaatcctgttaccagtcaggcatttgagaagcacacggtcacactgcttccggtagtcaataaaccggtaaaccagcaatagacataagcggctatttaacgaccctgccctgaaccgacgaccgggtcgaatttgctttcgaatttctgccattcatccgcttattatcacttattcaggcgtagcaccaggcgtttaagggcaccaataactgccttaaaaaaattacgccccgccctgccactcatcgcagtactgttgtaattcattaagcattctgccgacatggaagccatcacagacggcatgatgaacctgaatcgccagcggcatcagcaccttgtcgccttgcgtataatatttgcccatggtgaaaacgggggcgaagaagttgtccatattggccacgtttaaatcaaaactggtgaaactcacccagggattggctgagacgaaaaacatattctcaataaaccctttagggaaataggccaggttttcaccgtaacacgccacatcttgcgaatatatgtgtagaaactgccggaaatcgtcgtggtattcactccagagcgatgaaaacgtttcagtttgctcatggaaaacggtgtaacaagggtgaacactatcccatatcaccagctcaccgtctttcattgccatacggaattccggatgagcattcatcaggcgggcaagaatgtgaataaaggccggataaaacttgtgcttatttttctttacggtctttaaaaaggccgtaatatccagctgaacggtctggttataggtacattgagcaactgactgaaatgcctcaaaatgttctttacgatgccattgggatatatcaacggtggtatatccagtgatttttttctccattttagcttccttagctcctgaaaatctcgataactcaaaaaatacgcccggtagtgatcttatttcattatggtgaaagttggaacctcttacgtgccgatcaacgtctcattttcgccaaaagttggcccagggcttcccggtatcaacagggacaccaggatttatttattctgcgaagtgatcttccgtcacaggtatttattcggcgcaaagtgcgtcgggtgatgctgccaacttactgatttagtgtatgatggtgtttttgaggtgctccagtggcttctgtttctatcagctgtccctcctgttcagctactgacggggtggtgcgtaacggcaaaagcaccgccggacatcagcgctagcggagtgtatactggcttactatgttggcactgatgagggtgtcagtgaagtgcttcatgtggcaggagaaaaaaggctgcaccggtgcgtcagcagaatatgtgatacaggatatattccgcttcctcgctcactgactcgctacgctcggtcgttcgactgcggcgagcggaaatggcttacgaacggggcggagatttcctggaagatgccaggaagatacttaacagggaagtgagagggccgcggcaaagccgtttttccataggctccgcccccctgacaagcatcacgaaatctgacgctcaaatcagtggtggcgaaacccgacaggactataaagataccaggcgtttccccctggcggctccctcgtgcgctctcctgttcctgcctttcggtttaccggtgtcattccgctgttatggccgcgtttgtctcattccacgcctgacactcagttccgggtaggcagttcgctccaagctggactgtatgcacgaaccccccgttcagtccgaccgctgcgccttatccggtaactatcgtcttgagtccaacccggaaagacatgcaaaagcaccactggcagcagccactggtaattgatttagaggagttagtcttgaagtcatgcgccggttaaggctaaactgaaaggacaagttttggtgactgcgctcctccaagccagttacctcggttcaaagagttggtagctcagagaaccttcgaaaaaccgccctgcaaggcggttttttcgttttcagagcaagagattacgcgcagaccaaaacgatctcaagaagatcatcttattaatcagataaaatatttgctcatgagcccgaagtggcgagcccgatcttccccatcggtgatgtcggcgatataggcgccagcaaccgcacctgtggcgccggtgatgccggccacgatgcgtccggcgtagaggatctgctcatgtttgacagcttatcatcgatgcataatgtgcctgtcaaatggacgaagcagggattctgcaaaccctatgctactccgtcaagccgtcaattgtctgattcgttaccaattatgacaacttgacggctacatcattcactttttcttcacaaccggcacggaactcgctcgggctggccccggtgcattttttaaatacccgcgagaaatagagttgatcgtcaaaaccaacattgcgaccgacggtggcgataggcatccgggtggtgctcaaaagcagcttcgcctggctgatacgttggtcctcgcgccagcttaagacgctaatccctaactgctggcggaaaagatgtgacagacgcgacggcgacaagcaaacatgctgtgcgacgctggcgatatcaaaattgctgtctgccaggtgatcgctgatgtactgacaagcctcgcgtacccgattatccatcggtggatggagcgactcgttaatcgcttccatgcgccgcagtaacaattgctcaagcagatttatcgccagcagctccgaatagcgcccttccccttgcccggcgttaatgatttgcccaaacaggtcgctgaaatgcggctggtgcgcttcatccgggcgaaagaaccccgtattggcaaatattgacggccagttaagccattcatgccagtaggcgcgcggacgaaagtaaacccactggtgataccattcgcgagcctccggatgacgaccgtagtgatgaatctctcctggcgggaacagcaaaatatcacccggtcggcaaacaaattctcgtccctgatttttcaccaccccctgaccgcgaatggtgagattgagaatataacctttcattcccagcggtcggtcgataaaaaaatcgagataaccgttggcctcaatcggcgttaaacccgccaccagatgggcattaaacgagtatcccggcagcaggggatcattttgcgcttcagccatacttttcatactcccgccattcagagaagaaaccaattgtccatattgcatcagacattgccgtcactgcgtcttttactggctcttctcgctaaccaaaccggtaaccccgcttattaaaagcattctgtaacaaagcgggaccaaagccatgacaaaaacgcgtaacaaaagtgtctataatcacggcagaaaagtccacattgattatttgcacggcgtcacactttgctatgccatagcatttttatccataagattagcggatcctacctgacgctttttatcgcaactctctactgtttctccatacccgtttttttgggctagcgaattcgagctcggtacccggggatcctctagtctagagtcacacaggactactatatgaaagacttagcgaaacggtttggcaccaatctacgcaataaacgccgagataaaggtgtgtcccaagaccaactagcgttgcaagcaaacattgacagaagctatgttgggcgaattgaacgaggagaagtaaacatcacactcgaaaaagcctatcaattagcgcatgtacttgggtgtgatgttagagagcttcttccgtaagcttggctgttttggcggatgagagaagattttcagcctgatacagattaaatcagaacgcagaagcggtctgataaaacagaatttgcctggcggcagtagcgcggtggtcccacctgaccccatgccgaactcagaagtgaaacgccgtagcgccgatggtagtgtggggtctccccatgcgagagtagggaactgccaggcatcaaataaaacgaaaggctcagtcgaaagactgggcctttcgttttatctgttgtttgtcggtgaacgctctcctgagtaggacaaatccgccgggagcggatttgaacgttgcgaagcaacggcccggagggtggcgggcaggacgcccgccataaactgccaggcatcaaattaagcagaaggccatcctgacggatggcctttttgcgtttctacaaactcttttgtttatttttctaaatacattcaaatatgtatccgctcatgagacaataaccctgataaatgcttcaataatattgaaaaaggaagagtatgagtattcaacatttccgtgtcgcccttattcccttttttgcggcattttgccttcctgtttttgctcacccagaaacgctggtgaaagtaaaagatgctgaagatcagttgggtgca

SEQ ID NO: 5640 - DNA, 4542 bp, Artificial Sequence
  Description of Artificial Sequence: Synthetic polynucleotide
atcgatgcataatgtgcctgtcaaatggacgaagcagggattctgcaaaccctatgctactccgtcaagccgtcaattgtctgattcgttaccaattatgacaacttgacggctacatcattcactttttcttcacaaccggcacggaactcgctcgggctggccccggtgcattttttaaatacccgcgagaaatagagttgatcgtcaaaaccaacattgcgaccgacggtggcgataggcatccgggtggtgctcaaaagcagcttcgcctggctgatacgttggtcctcgcgccagcttaagacgctaatccctaactgctggcggaaaagatgtgacagacgcgacggcgacaagcaaacatgctgtgcgacgctggcgatatcaaaattgctgtctgccaggtgatcgctgatgtactgacaagcctcgcgtacccgattatccatcggtggatggagcgactcgttaatcgcttccatgcgccgcagtaacaattgctcaagcagatttatcgccagcagctccgaatagcgcccttccccttgcccggcgttaatgatttgcccaaacaggtcgctgaaatgcggctggtgcgcttcatccgggcgaaagaaccccgtattggcaaatattgacggccagttaagccattcatgccagtaggcgcgcggacgaaagtaaacccactggtgataccattcgcgagcctccggatgacgaccgtagtgatgaatctctcctggcgggaacagcaaaatatcacccggtcggcaaacaaattctcgtccctgatttttcaccaccccctgaccgcgaatggtgagattgagaatataacctttcattcccagcggtcggtcgataaaaaaatcgagataaccgttggcctcaatcggcgttaaacccgccaccagatgggcattaaacgagtatcccggcagcaggggatcattttgcgcttcagccatacttttcatactcccgccattcagagaagaaaccaattgtccatattgcatcagacattgccgtcactgcgtcttttactggctcttctcgctaaccaaaccggtaaccccgcttattaaaagcattctgtaacaaagcgggaccaaagccatgacaaaaacgcgtaacaaaagtgtctataatcacggcagaaaagtccacattgattatttgcacggcgtcacactttgctatgccatagcatttttatccataagattagcggatcctacctgacgctttttatcgcaactctctactgtttctccatacccgtttttttgggctagcaggaggaattcaccatggtacccggggatcctctagagtcgacctgcaggcatgcaagcttggctgttttggcggatgagagaagattttcagcctgatacagattaaatcagaacgcagaagcggtctgataaaacagaatttgcctggcggcagtagcgcggtggtcccacctgaccccatgccgaactcagaagtgaaacgccgtagcgccgatggtagtgtggggtctccccatgcgagagtagggaactgccaggcatcaaataaaacgaaaggctcagtcgaaagactgggcctttcgttttatctgttgtttgtcggtgaacgctctcctgagtaggacaaatccgccgggagcggatttgaacgttgcgaagcaacggcccggagggtggcgggcaggacgcccgccataaactgccaggcatcaaattaagcagaaggccatcctgacggatggcctttttgcgtttctacaaactcttttgtttatttttctaaatacattcaaatatgtatccgctcatgagacaataaccctgataaatgcttcaataatattgaaaaaggaagagtatgagtattcaacatttccgtgtcgcccttattcccttttttgcggcattttgccttcctgtttttgctcacccagaaacgctggtgaaagtaaaagatgctgaagatcagttgggtgcacgagtgggttacatcgaactggatctcaacagcggtaagatccttgagagttttcgccccgaagaacgttttccaatgatgagcacttttaaagttctgctatgtggcgcggtattatcccgtgttgacgccgggcaagagcaactcggtcgccgcatacactattctcagaatgacttggttgagtactcaccagtcacagaaaagcatcttacggatggcatgacagtaagagaattatgcagtgctgccataaccatgagtgataacactgcggccaacttacttctgacaacgatcggaggaccgaaggagctaaccgcttttttgcacaacatgggggatcatgtaactcgccttgatcgttgggaaccggagctgaatgaagccataccaaacgacgagcgtgacaccacgatgcctgtagcaatggcaacaacgttgcgcaaactattaactggcgaactacttactctagcttcccggcaacaattaatagactggatggaggcggataaagttgcaggaccacttctgcgctcggcccttccggctggctggtttattgctgataaatctggagccggtgagcgtgggtctcgcggtatcattgcagcactggggccagatggtaagccctcccgtatcgtagttatctacacgacggggagtcaggcaactatggatgaacgaaatagacagatcgctgagataggtgcctcactgattaagcattggtaactgtcagaccaagtttactcatatatactttagattgatttacgcgccctgtagcggcgcattaagcgcggcgggtgtggtggttacgcgcagcgtgaccgctacacttgccagcgccctagcgcccgctcctttcgctttcttcccttcctttctcgccacgttcgccggctttccccgtcaagctctaaatcgggggctccctttagggttccgatttagtgctttacggcacctcgaccccaaaaaacttgatttgggtgatggttcacgtagtgggccatcgccctgatagacggtttttcgccctttgacgttggagtccacgttctttaatagtggactcttgttccaaacttgaacaacactcaaccctatctcgggctattcttttgatttataagggattttgccgatttcggcctattggttaaaaaatgagctgatttaacaaaaatttaacgcgaattttaacaaaatattaacgtttacaatttaaaaggatctaggtgaagatcctttttgataatctcatgaccaaaatcccttaacgtgagttttcgttccactgagcgtcagaccccgtagaaaagatcaaaggatcttcttgagatcctttttttctgcgcgtaatctgctgcttgcaaacaaaaaaaccaccgctaccagcggtggtttgtttgccggatcaagagctaccaactctttttccgaaggtaactggcttcagcagagcgcagataccaaatactgtccttctagtgtagccgtagttaggccaccacttcaagaactctgtagcaccgcctacatacctcgctctgctaatcctgttaccagtggctgctgccagtggcgataagtcgtgtcttaccgggttggactcaagacgatagttaccggataaggcgcagcggtcgggctgaacggggggttcgtgcacacagcccagcttggagcgaacgacctacaccgaactgagatacctacagcgtgagctatgagaaagcgccacgcttcccgaagggagaaaggcggacaggtatccggtaagcggcagggtcggaacaggagagcgcacgagggagcttccagggggaaacgcctggtatctttatagtcctgtcgggtttcgccacctctgacttgagcgtcgatttttgtgatgctcgtcaggggggcggagcctatggaaaaacgccagcaacgcggcctttttacggttcctggccttttgctggccttttgctcacatgttctttcctgcgttatcccctgattctgtggataaccgtattaccgcctttgagtgagctgataccgctcgccgcagccgaacgaccgagcgcagcgagtcagtgagcgaggaagcggaagagcgcctgatgcggtattttctccttacgcatctgtgcggtatttcacaccgcatagggtcatggctgcgccccgacacccgccaacacccgctgacgcgccctgacgggcttgtctgctcccggcatccgcttacagacaagctgtgaccgtctccgggagctgcatgtgtcagaggttttcaccgtcatcaccgaaacgcgcgaggcagcaaggagatggcgcccaacagtcccccggccacggggcctgccaccatacccacgccgaaacaagcgctcatgagcccgaagtggcgagcccgatcttccccatcggtgatgtcggcgatataggcgccagcaaccgcacctgtggcgccggtgatgccggccacgatgcgtccggcgtagaggatctgctcatgtttgacagcttatc

SEQ ID NO: 5641 - DNA, 6231 bp, Artificial Sequence
  Description of Artificial Sequence: Synthetic polynucleotide
ctcgagcacccgggaccatgattacggattcactggccgtcgttttacaacgtcgtgactgggaaaaccctggcgttacccaacttaatcgccttgcagcacatccccctttcgccagctggcgtaatagcgaagaggcccgcaccgatcgcccttcccaacagttgcgcagcctgaatggcgaatggcgctttgcctggtttccggcaccagaagcggtgccggaaagctggctggagtgcgatcttcctgaggccgatactgtcgtcgtcccctcaaactggcagatgcacggttacgatgcgcccatctacaccaacgtgacctatcccattacggtcaatccgccgtttgttcccacggagaatccgacgggttgttactcgctcacatttaatgttgatgaaagctggctacaggaaggccagacgcgaattatttttgatggcgttaactcggcgtttcatctgtggtgcaacgggcgctgggtcggttacggccaggacagtcgtttgccgtctgaatttgacctgagcgcatttttacgcgccggagaaaaccgcctcgcggtgatggtgctgcgctggagtgacggcagttatctggaagatcaggatatgtggcggatgagcggcattttccgtgacgtctcgttgctgcataaaccgactacacaaatcagcgatttccatgttgccactcgctttaatgatgatttcagccgcgctgtactggaggctgaagttcagatgtgcggcgagttgcgtgactacctacgggtaacagtttctttatggcagggtgaaacgcaggtcgccagcggcaccgcgcctttcggcggtgaaattatcgatgagcgtggtggttatgccgatcgcgtcacactacgtctgaacgtcgaaaacccgaaactgtggagcgccgaaatcccgaatctctatcgtgcggtggttgaactgcacaccgccgacggcacgctgattgaagcagaagcctgcgatgtcggtttccgcgaggtgcggattgaaaatggtctgctgctgctgaacggcaagccgttgctgattcgaggcgttaaccgtcacgagcatcatcctctgcatggtcaggtcatggatgagcagacgatggtgcaggatatcctgctgatgaagcagaacaactttaacgccgtgcgctgttcgcattatccgaaccatccgctgtggtacacgctgtgcgaccgctacggcctgtatgtggtggatgaagccaatattgaaacccacggcatggtgccaatgaatcgtctgaccgatgatccgcgctggctaccggcgatgagcgaacgcgtaacgcgaatggtgcagcgcgatcgtaatcacccgagtgtgatcatctggtcgctggggaatgaatcaggccacggcgctaatcacgacgcgctgtatcgctggatcaaatctgtcgatccttcccgcccggtgcagtatgaaggcggcggagccgacaccacggccaccgatattatttgcccgatgtacgcgcgcgtggatgaagaccagcccttcccggctgtgccgaaatggtccatcaaaaaatggctttcgctacctggagagacgcgcccgctgatcctttgcgaatacgcccacgcgatgggtaacagtcttggcggtttcgctaaatactggcaggcgtttcgtcagtatccccgtttacagggcggcttcgtctgggactgggtggatcagtcgctgattaaatatgatgaaaacggcaacccgtggtcggcttacggcggtgattttggcgatacgccgaacgatcgccagttctgtatgaacggtctggtctttgccgaccgcacgccgcatccagcgctgacggaagcaaaacaccagcagcagtttttccagttccgtttatccgggcaaaccatcgaagtgaccagcgaatacctgttccgtcatagcgataacgagctcctgcactggatggtggcgctggatggtaagccgctggcaagcggtgaagtgcctctggatgtcgctccacaaggtaaacagttgattgaactgcctgaactaccgcagccggagagcgccgggcaactctggctcacagtacgcgtagtgcaaccgaacgcgaccgcatggtcagaagccgggcacatcagcgcctggcagcagtggcgtctggcggaaaacctcagtgtgacgctccccgccgcgtcccacgccatcccgcatctgaccaccagcgaaatggatttttgcatcgagctgggtaataagcgttggcaatttaaccgccagtcaggctttctttcacagatgtggattggcgataaaaaacaactgctgacgccgctgcgcgatcagttcacccgtgcaccgctggataacgacattggcgtaagtgaagcgacccgcattgaccctaacgcctgggtcgaacgctggaaggcggcgggccattaccaggccgaagcagcgttgttgcagtgcacggcagatacacttgctgatgcggtgctgattacgaccgctcacgcgtggcagcatcaggggaaaaccttatttatcagccggaaaacctaccggattgatggtagtggtcaaatggcgattaccgttgatgttgaagtggcgagcgatacaccgcatccggcgcggattggcctgaactgccagctggcgcaggtagcagagcgggtaaactggctcggattagggccgcaagaaaactatcccgaccgccttactgccgcctgttttgaccgctgggatctgccattgtcagacatgtataccccgtacgtcttcccgagcgaaaacggtctgcgctgcgggacgcgcgaattgaattatggcccacaccagtggcgcggcgacttccagttcaacatcagccgctacagtcaacagcaactgatggaaaccagccatcgccatctgctgcacgcggaagaaggcacatggctgaatatcgacggtttccatatggggattggtggcgacgactcctggagcccgtcagtatcggcggaattccagctgagcgccggtcgctaccattaccagttggtctggtgtcaaaaataagcctgatacagattaaatcagaacgcagaagcggtctgataaaacagaatttgcctggcggcagtagcgcggtggtcccacctgaccccatgccgaactcagaagtgaaacgccgtagcgccgatggtagtgtggggtctccccatgcgagagtagggaactgccaggcatcaaataaaacgaaaggctcagtcgaaagactgggcctttcgttttatctgttgtttgtcggtgaacgctctcctgagtaggacaaatccgccgggagcggatttgaacgttgcgaagcaacggcccggagggtggcgggcaggacgcccgccataaactgccaggcatcaaattaagcagaaggccatcctgacggatggcctttttgcgtttctacaaactcttttgtttatttttctaaatacattcaaatatgtatccgctcatgagacaataaccctgataaatgcttcaataatattgaaaaaggaagagtatgagtattcaacatttccgtgtcgcccttattcccttttttgcggcattttgccttcctgtttttgctcacccagaaacgctggtgaaagtaaaagatgctgaagatcagttgggtgcacgagtgggttacatcgaactggatctcaacagcggtaagatccttgagagttttcgccccgaagaacgttttccaatgatgagcacttttaaagttctgctatgtggcgcggtattatcccgtgttgacgccgggcaagagcaactcggtcgccgcatacactattctcagaatgacttggttgagtactcaccagtcacagaaaagcatcttacggatggcatgacagtaagagaattatgcagtgctgccataaccatgagtgataacactgcggccaacttacttctgacaacgatcggaggaccgaaggagctaaccgcttttttgcacaacatgggggatcatgtaactcgccttgatcgttgggaaccggagctgaatgaagccataccaaacgacgagcgtgacaccacgatgcctgtagcaatggcaacaacgttgcgcaaactattaactggcgaactacttactctagcttcccggcaacaattaatagactggatggaggcggataaagttgcaggaccacttctgcgctcggcccttccggctggctggtttattgctgataaatctggagccggtgagcgtgggtctcgcggtatcattgcagcactggggccagatggtaagccctcccgtatcgtagttatctacacgacggggagtcaggcaactatggatgaacgaaatagacagatcgctgagataggtgcctcactgattaagcattggtaactgtcagaccaagtttactcatatatactttagattgatttacgcgccctgtagcggcgcattaagcgcggcgggtgtggtggttacgcgcagcgtgaccgctacacttgccagcgccctagcgcccgctcctttcgctttcttcccttcctttctcgccacgttcgccggctttccccgtcaagctctaaatcgggggctccctttagggttccgatttagtgctttacggcacctcgaccccaaaaaacttgatttgggtgatggttcacgtagtgggccatcgccctgatagacggtttttcgccctttgacgttggagtccacgttctttaatagtggactcttgttccaaacttgaacaacactcaaccctatctcgggctattcttttgatttataagggattttgccgatttcggcctattggttaaaaaatgagctgatttaacaaaaatttaacgcgaattttaacaaaatattaacgtttacaatttaaaaggatctaggtgaagatcctttttgataatctcatgaccaaaatcccttaacgtgagttttcgttccactgagcgtcagaccccgtagaaaagatcaaaggatcttcttgagatcctttttttctgcgcgtaatctgctgcttgcaaacaaaaaaaccaccgctaccagcggtggtttgtttgccggatcaagagctaccaactctttttccgaaggtaactggcttcagcagagcgcagataccaaatactgtccttctagtgtagccgtagttaggccaccacttcaagaactctgtagcaccgcctacatacctcgctctgctaatcctgttaccagtggctgctgccagtggcgataagtcgtgtcttaccgggttggactcaagacgatagttaccggataaggcgcagcggtcgggctgaacggggggttcgtgcacacagcccagcttggagcgaacgacctacaccgaactgagatacctacagcgtgagctatgagaaagcgccacgcttcccgaagggagaaaggcggacaggtatccggtaagcggcagggtcggaacaggagagcgcacgagggagcttccagggggaaacgcctggtatctttatagtcctgtcgggtttcgccacctctgacttgagcgtcgatttttgtgatgctcgtcaggggggcggagcctatggaaaaacgccagcaacgcggcctttttacggttcctggccttttgctggccttttgctcacatgttctttcctgcgttatcccctgattctgtggataaccgtattaccgcctttgagtgagctgataccgctcgccgcagccgaacgaccgagcgcagcgagtcagtgagcgaggaagcggaagagcgcctgatgcggtattttctccttacgcatctgtgcggtatttcacaccgcatagggtcatggctgcgccccgacacccgccaacacccgctgacgcgccctgacgggcttgtctgctcccggcatccgcttacagacaagctgtgaccgtctccgggagctgcatgtgtcagaggttttcaccgtcatcaccgaaacgcgcgaggcagcaaggagatggcgcccaacagtcccccggccacggggcctgccaccatacccacgccgaaacaagcgctcatgagcccgaagtggcgagcccgatcttccccatcggtgatgtcggcgatataggcgccagcaaccgcacctgtggcgccggtgatgccggccacgatgcgtccggcgtagaggatctgctcatgtttgacagcttatc

SEQ ID NO: 5642 - DNA, 6374 bp, Artificial Sequence
  Description of Artificial Sequence: Synthetic polynucleotide
ctcgagggttcgccaatgctgaagtgactcttacaggcaataaaaacttaggattgctaagtatacaaaaatcagtaaaacttagacaatctaagttatctaaaggttgaaaagaaatgtgtaagtgcaaaaagacaaccccatcccagcgagggggaccatgattacggattcactggccgtcgttttacaacgtcgtgactgggaaaaccctggcgttacccaacttaatcgccttgcagcacatccccctttcgccagctggcgtaatagcgaagaggcccgcaccgatcgcccttcccaacagttgcgcagcctgaatggcgaatggcgctttgcctggtttccggcaccagaagcggtgccggaaagctggctggagtgcgatcttcctgaggccgatactgtcgtcgtcccctcaaactggcagatgcacggttacgatgcgcccatctacaccaacgtgacctatcccattacggtcaatccgccgtttgttcccacggagaatccgacgggttgttactcgctcacatttaatgttgatgaaagctggctacaggaaggccagacgcgaattatttttgatggcgttaactcggcgtttcatctgtggtgcaacgggcgctgggtcggttacggccaggacagtcgtttgccgtctgaatttgacctgagcgcatttttacgcgccggagaaaaccgcctcgcggtgatggtgctgcgctggagtgacggcagttatctggaagatcaggatatgtggcggatgagcggcattttccgtgacgtctcgttgctgcataaaccgactacacaaatcagcgatttccatgttgccactcgctttaatgatgatttcagccgcgctgtactggaggctgaagttcagatgtgcggcgagttgcgtgactacctacgggtaacagtttctttatggcagggtgaaacgcaggtcgccagcggcaccgcgcctttcggcggtgaaattatcgatgagcgtggtggttatgccgatcgcgtcacactacgtctgaacgtcgaaaacccgaaactgtggagcgccgaaatcccgaatctctatcgtgcggtggttgaactgcacaccgccgacggcacgctgattgaagcagaagcctgcgatgtcggtttccgcgaggtgcggattgaaaatggtctgctgctgctgaacggcaagccgttgctgattcgaggcgttaaccgtcacgagcatcatcctctgcatggtcaggtcatggatgagcagacgatggtgcaggatatcctgctgatgaagcagaacaactttaacgccgtgcgctgttcgcattatccgaaccatccgctgtggtacacgctgtgcgaccgctacggcctgtatgtggtggatgaagccaatattgaaacccacggcatggtgccaatgaatcgtctgaccgatgatccgcgctggctaccggcgatgagcgaacgcgtaacgcgaatggtgcagcgcgatcgtaatcacccgagtgtgatcatctggtcgctggggaatgaatcaggccacggcgctaatcacgacgcgctgtatcgctggatcaaatctgtcgatccttcccgcccggtgcagtatgaaggcggcggagccgacaccacggccaccgatattatttgcccgatgtacgcgcgcgtggatgaagaccagcccttcccggctgtgccgaaatggtccatcaaaaaatggctttcgctacctggagagacgcgcccgctgatcctttgcgaatacgcccacgcgatgggtaacagtcttggcggtttcgctaaatactggcaggcgtttcgtcagtatccccgtttacagggcggcttcgtctgggactgggtggatcagtcgctgattaaatatgatgaaaacggcaacccgtggtcggcttacggcggtgattttggcgatacgccgaacgatcgccagttctgtatgaacggtctggtctttgccgaccgcacgccgcatccagcgctgacggaagcaaaacaccagcagcagtttttccagttccgtttatccgggcaaaccatcgaagtgaccagcgaatacctgttccgtcatagcgataacgagctcctgcactggatggtggcgctggatggtaagccgctggcaagcggtgaagtgcctctggatgtcgctccacaaggtaaacagttgattgaactgcctgaactaccgcagccggagagcgccgggcaactctggctcacagtacgcgtagtgcaaccgaacgcgaccgcatggtcagaagccgggcacatcagcgcctggcagcagtggcgtctggcggaaaacctcagtgtgacgctccccgccgcgtcccacgccatcccgcatctgaccaccagcgaaatggatttttgcatcgagctgggtaataagcgttggcaatttaaccgccagtcaggctttctttcacagatgtggattggcgataaaaaacaactgctgacgccgctgcgcgatcagttcacccgtgcaccgctggataacgacattggcgtaagtgaagcgacccgcattgaccctaacgcctgggtcgaacgctggaaggcggcgggccattaccaggccgaagcagcgttgttgcagtgcacggcagatacacttgctgatgcggtgctgattacgaccgctcacgcgtggcagcatcaggggaaaaccttatttatcagccggaaaacctaccggattgatggtagtggtcaaatggcgattaccgttgatgttgaagtggcgagcgatacaccgcatccggcgcggattggcctgaactgccagctggcgcaggtagcagagcgggtaaactggctcggattagggccgcaagaaaactatcccgaccgccttactgccgcctgttttgaccgctgggatctgccattgtcagacatgtataccccgtacgtcttcccgagcgaaaacggtctgcgctgcgggacgcgcgaattgaattatggcccacaccagtggcgcggcgacttccagttcaacatcagccgctacagtcaacagcaactgatggaaaccagccatcgccatctgctgcacgcggaagaaggcacatggctgaatatcgacggtttccatatggggattggtggcgacgactcctggagcccgtcagtatcggcggaattccagctgagcgccggtcgctaccattaccagttggtctggtgtcaaaaataagcctgatacagattaaatcagaacgcagaagcggtctgataaaacagaatttgcctggcggcagtagcgcggtggtcccacctgaccccatgccgaactcagaagtgaaacgccgtagcgccgatggtagtgtggggtctccccatgcgagagtagggaactgccaggcatcaaataaaacgaaaggctcagtcgaaagactgggcctttcgttttatctgttgtttgtcggtgaacgctctcctgagtaggacaaatccgccgggagcggatttgaacgttgcgaagcaacggcccggagggtggcgggcaggacgcccgccataaactgccaggcatcaaattaagcagaaggccatcctgacggatggcctttttgcgtttctacaaactcttttgtttatttttctaaatacattcaaatatgtatccgctcatgagacaataaccctgataaatgcttcaataatattgaaaaaggaagagtatgagtattcaacatttccgtgtcgcccttattcccttttttgcggcattttgccttcctgtttttgctcacccagaaacgctggtgaaagtaaaagatgctgaagatcagttgggtgcacgagtgggttacatcgaactggatctcaacagcggtaagatccttgagagttttcgccccgaagaacgttttccaatgatgagcacttttaaagttctgctatgtggcgcggtattatcccgtgttgacgccgggcaagagcaactcggtcgccgcatacactattctcagaatgacttggttgagtactcaccagtcacagaaaagcatcttacggatggcatgacagtaagagaattatgcagtgctgccataaccatgagtgataacactgcggccaacttacttctgacaacgatcggaggaccgaaggagctaaccgcttttttgcacaacatgggggatcatgtaactcgccttgatcgttgggaaccggagctgaatgaagccataccaaacgacgagcgtgacaccacgatgcctgtagcaatggcaacaacgttgcgcaaactattaactggcgaactacttactctagcttcccggcaacaattaatagactggatggaggcggataaagttgcaggaccacttctgcgctcggcccttccggctggctggtttattgctgataaatctggagccggtgagcgtgggtctcgcggtatcattgcagcactggggccagatggtaagccctcccgtatcgtagttatctacacgacggggagtcaggcaactatggatgaacgaaatagacagatcgctgagataggtgcctcactgattaagcattggtaactgtcagaccaagtttactcatatatactttagattgatttacgcgccctgtagcggcgcattaagcgcggcgggtgtggtggttacgcgcagcgtgaccgctacacttgccagcgccctagcgcccgctcctttcgctttcttcccttcctttctcgccacgttcgccggctttccccgtcaagctctaaatcgggggctccctttagggttccgatttagtgctttacggcacctcgaccccaaaaaacttgatttgggtgatggttcacgtagtgggccatcgccctgatagacggtttttcgccctttgacgttggagtccacgttctttaatagtggactcttgttccaaacttgaacaacactcaaccctatctcgggctattcttttgatttataagggattttgccgatttcggcctattggttaaaaaatgagctgatttaacaaaaatttaacgcgaattttaacaaaatattaacgtttacaatttaaaaggatctaggtgaagatcctttttgataatctcatgaccaaaatcccttaacgtgagttttcgttccactgagcgtcagaccccgtagaaaagatcaaaggatcttcttgagatcctttttttctgcgcgtaatctgctgcttgcaaacaaaaaaaccaccgctaccagcggtggtttgtttgccggatcaagagctaccaactctttttccgaaggtaactggcttcagcagagcgcagataccaaatactgtccttctagtgtagccgtagttaggccaccacttcaagaactctgtagcaccgcctacatacctcgctctgctaatcctgttaccagtggctgctgccagtggcgataagtcgtgtcttaccgggttggactcaagacgatagttaccggataaggcgcagcggtcgggctgaacggggggttcgtgcacacagcccagcttggagcgaacgacctacaccgaactgagatacctacagcgtgagctatgagaaagcgccacgcttcccgaagggagaaaggcggacaggtatccggtaagcggcagggtcggaacaggagagcgcacgagggagcttccagggggaaacgcctggtatctttatagtcctgtcgggtttcgccacctctgacttgagcgtcgatttttgtgatgctcgtcaggggggcggagcctatggaaaaacgccagcaacgcggcctttttacggttcctggccttttgctggccttttgctcacatgttctttcctgcgttatcccctgattctgtggataaccgtattaccgcctttgagtgagctgataccgctcgccgcagccgaacgaccgagcgcagcgagtcagtgagcgaggaagcggaagagcgcctgatgcggtattttctccttacgcatctgtgcggtatttcacaccgcatagggtcatggctgcgccccgacacccgccaacacccgctgacgcgccctgacgggcttgtctgctcccggcatccgcttacagacaagctgtgaccgtctccgggagctgcatgtgtcagaggttttcaccgtcatcaccgaaacgcgcgaggcagcaaggagatggcgcccaacagtcccccggccacggggcctgccaccatacccacgccgaaacaagcgctcatgagcccgaagtggcgagcccgatcttccccatcggtgatgtcggcgatataggcgccagcaaccgcacctgtggcgccggtgatgccggccacgatgcgtccggcgtagaggatctgctcatgtttgacagcttatc

SEQ ID NO: 5643 - DNA, 6349 bp, Artificial Sequence
  Description of Artificial Sequence: Synthetic polynucleotide
ctcgagggcgtaaccacgcaatagttagtttattaaagttcacaatttggctccatagaatttgaattatcgggattaacggcaatactaaaacttagatactctaagttttagtggtggcatgtgagggggaccatgattacggattcactggccgtcgttttacaacgtcgtgactgggaaaaccctggcgttacccaacttaatcgccttgcagcacatccccctttcgccagctggcgtaatagcgaagaggcccgcaccgatcgcccttcccaacagttgcgcagcctgaatggcgaatggcgctttgcctggtttccggcaccagaagcggtgccggaaagctggctggagtgcgatcttcctgaggccgatactgtcgtcgtcccctcaaactggcagatgcacggttacgatgcgcccatctacaccaacgtgacctatcccattacggtcaatccgccgtttgttcccacggagaatccgacgggttgttactcgctcacatttaatgttgatgaaagctggctacaggaaggccagacgcgaattatttttgatggcgttaactcggcgtttcatctgtggtgcaacgggcgctgggtcggttacggccaggacagtcgtttgccgtctgaatttgacctgagcgcatttttacgcgccggagaaaaccgcctcgcggtgatggtgctgcgctggagtgacggcagttatctggaagatcaggatatgtggcggatgagcggcattttccgtgacgtctcgttgctgcataaaccgactacacaaatcagcgatttccatgttgccactcgctttaatgatgatttcagccgcgctgtactggaggctgaagttcagatgtgcggcgagttgcgtgactacctacgggtaacagtttctttatggcagggtgaaacgcaggtcgccagcggcaccgcgcctttcggcggtgaaattatcgatgagcgtggtggttatgccgatcgcgtcacactacgtctgaacgtcgaaaacccgaaactgtggagcgccgaaatcccgaatctctatcgtgcggtggttgaactgcacaccgccgacggcacgctgattgaagcagaagcctgcgatgtcggtttccgcgaggtgcggattgaaaatggtctgctgctgctgaacggcaagccgttgctgattcgaggcgttaaccgtcacgagcatcatcctctgcatggtcaggtcatggatgagcagacgatggtgcaggatatcctgctgatgaagcagaacaactttaacgccgtgcgctgttcgcattatccgaaccatccgctgtggtacacgctgtgcgaccgctacggcctgtatgtggtggatgaagccaatattgaaacccacggcatggtgccaatgaatcgtctgaccgatgatccgcgctggctaccggcgatgagcgaacgcgtaacgcgaatggtgcagcgcgatcgtaatcacccgagtgtgatcatctggtcgctggggaatgaatcaggccacggcgctaatcacgacgcgctgtatcgctggatcaaatctgtcgatccttcccgcccggtgcagtatgaaggcggcggagccgacaccacggccaccgatattatttgcccgatgtacgcgcgcgtggatgaagaccagcccttcccggctgtgccgaaatggtccatcaaaaaatggctttcgctacctggagagacgcgcccgctgatcctttgcgaatacgcccacgcgatgggtaacagtcttggcggtttcgctaaatactggcaggcgtttcgtcagtatccccgtttacagggcggcttcgtctgggactgggtggatcagtcgctgattaaatatgatgaaaacggcaacccgtggtcggcttacggcggtgattttggcgatacgccgaacgatcgccagttctgtatgaacggtctggtctttgccgaccgcacgccgcatccagcgctgacggaagcaaaacaccagcagcagtttttccagttccgtttatccgggcaaaccatcgaagtgaccagcgaatacctgttccgtcatagcgataacgagctcctgcactggatggtggcgctggatggtaagccgctggcaagcggtgaagtgcctctggatgtcgctccacaaggtaaacagttgattgaactgcctgaactaccgcagccggagagcgccgggcaactctggctcacagtacgcgtagtgcaaccgaacgcgaccgcatggtcagaagccgggcacatcagcgcctggcagcagtggcgtctggcggaaaacctcagtgtgacgctccccgccgcgtcccacgccatcccgcatctgaccaccagcgaaatggatttttgcatcgagctgggtaataagcgttggcaatttaaccgccagtcaggctttctttcacagatgtggattggcgataaaaaacaactgctgacgccgctgcgcgatcagttcacccgtgcaccgctggataacgacattggcgtaagtgaagcgacccgcattgaccctaacgcctgggtcgaacgctggaaggcggcgggccattaccaggccgaagcagcgttgttgcagtgcacggcagatacacttgctgatgcggtgctgattacgaccgctcacgcgtggcagcatcaggggaaaaccttatttatcagccggaaaacctaccggattgatggtagtggtcaaatggcgattaccgttgatgttgaagtggcgagcgatacaccgcatccggcgcggattggcctgaactgccagctggcgcaggtagcagagcgggtaaactggctcggattagggccgcaagaaaactatcccgaccgccttactgccgcctgttttgaccgctgggatctgccattgtcagacatgtataccccgtacgtcttcccgagcgaaaacggtctgcgctgcgggacgcgcgaattgaattatggcccacaccagtggcgcggcgacttccagttcaacatcagccgctacagtcaacagcaactgatggaaaccagccatcgccatctgctgcacgcggaagaaggcacatggctgaatatcgacggtttccatatggggattggtggcgacgactcctggagcccgtcagtatcggcggaattccagctgagcgccggtcgctaccattaccagttggtctggtgtcaaaaataagcctgatacagattaaatcagaacgcagaagcggtctgataaaacagaatttgcctggcggcagtagcgcggtggtcccacctgaccccatgccgaactcagaagtgaaacgccgtagcgccgatggtagtgtggggtctccccatgcgagagtagggaactgccaggcatcaaataaaacgaaaggctcagtcgaaagactgggcctttcgttttatctgttgtttgtcggtgaacgctctcctgagtaggacaaatccgccgggagcggatttgaacgttgcgaagcaacggcccggagggtggcgggcaggacgcccgccataaactgccaggcatcaaattaagcagaaggccatcctgacggatggcctttttgcgtttctacaaactcttttgtttatttttctaaatacattcaaatatgtatccgctcatgagacaataaccctgataaatgcttcaataatattgaaaaaggaagagtatgagtattcaacatttccgtgtcgcccttattcccttttttgcggcattttgccttcctgtttttgctcacccagaaacgctggtgaaagtaaaagatgctgaagatcagttgggtgcacgagtgggttacatcgaactggatctcaacagcggtaagatccttgagagttttcgccccgaagaacgttttccaatgatgagcacttttaaagttctgctatgtggcgcggtattatcccgtgttgacgccgggcaagagcaactcggtcgccgcatacactattctcagaatgacttggttgagtactcaccagtcacagaaaagcatcttacggatggcatgacagtaagagaattatgcagtgctgccataaccatgagtgataacactgcggccaacttacttctgacaacgatcggaggaccgaaggagctaaccgcttttttgcacaacatgggggatcatgtaactcgccttgatcgttgggaaccggagctgaatgaagccataccaaacgacgagcgtgacaccacgatgcctgtagcaatggcaacaacgttgcgcaaactattaactggcgaactacttactctagcttcccggcaacaattaatagactggatggaggcggataaagttgcaggaccacttctgcgctcggcccttccggctggctggtttattgctgataaatctggagccggtgagcgtgggtctcgcggtatcattgcagcactggggccagatggtaagccctcccgtatcgtagttatctacacgacggggagtcaggcaactatggatgaacgaaatagacagatcgctgagataggtgcctcactgattaagcattggtaactgtcagaccaagtttactcatatatactttagattgatttacgcgccctgtagcggcgcattaagcgcggcgggtgtggtggttacgcgcagcgtgaccgctacacttgccagcgccctagcgcccgctcctttcgctttcttcccttcctttctcgccacgttcgccggctttccccgtcaagctctaaatcgggggctccctttagggttccgatttagtgctttacggcacctcgaccccaaaaaacttgatttgggtgatggttcacgtagtgggccatcgccctgatagacggtttttcgccctttgacgttggagtccacgttctttaatagtggactcttgttccaaacttgaacaacactcaaccctatctcgggctattcttttgatttataagggattttgccgatttcggcctattggttaaaaaatgagctgatttaacaaaaatttaacgcgaattttaacaaaatattaacgtttacaatttaaaaggatctaggtgaagatcctttttgataatctcatgaccaaaatcccttaacgtgagttttcgttccactgagcgtcagaccccgtagaaaagatcaaaggatcttcttgagatcctttttttctgcgcgtaatctgctgcttgcaaacaaaaaaaccaccgctaccagcggtggtttgtttgccggatcaagagctaccaactctttttccgaaggtaactggcttcagcagagcgcagataccaaatactgtccttctagtgtagccgtagttaggccaccacttcaagaactctgtagcaccgcctacatacctcgctctgctaatcctgttaccagtggctgctgccagtggcgataagtcgtgtcttaccgggttggactcaagacgatagttaccggataaggcgcagcggtcgggctgaacggggggttcgtgcacacagcccagcttggagcgaacgacctacaccgaactgagatacctacagcgtgagctatgagaaagcgccacgcttcccgaagggagaaaggcggacaggtatccggtaagcggcagggtcggaacaggagagcgcacgagggagcttccagggggaaacgcctggtatctttatagtcctgtcgggtttcgccacctctgacttgagcgtcgatttttgtgatgctcgtcaggggggcggagcctatggaaaaacgccagcaacgcggcctttttacggttcctggccttttgctggccttttgctcacatgttctttcctgcgttatcccctgattctgtggataaccgtattaccgcctttgagtgagctgataccgctcgccgcagccgaacgaccgagcgcagcgagtcagtgagcgaggaagcggaagagcgcctgatgcggtattttctccttacgcatctgtgcggtatttcacaccgcatagggtcatggctgcgccccgacacccgccaacacccgctgacgcgccctgacgggcttgtctgctcccggcatccgcttacagacaagctgtgaccgtctccgggagctgcatgtgtcagaggttttcaccgtcatcaccgaaacgcgcgaggcagcaaggagatggcgcccaacagtcccccggccacggggcctgccaccatacccacgccgaaacaagcgctcatgagcccgaagtggcgagcccgatcttccccatcggtgatgtcggcgatataggcgccagcaaccgcacctgtggcgccggtgatgccggccacgatgcgtccggcgtagaggatctgctcatgtttgacagcttatc

SEQ ID NO: 5644 - DNA, 6373 bp, Artificial Sequence
  Description of Artificial Sequence: Synthetic polynucleotide
ctcgaggctctggcaggatgtttcgtaatttccgctgagcattaaaaactaagtattgcttagtacacttgttcgtataagactaagagaatcttagctacctgatcctcagctagcagagaccccatgacaaacccattacccatcagaagggggaccatgattacggattcactggccgtcgttttacaacgtcgtgactgggaaaaccctggcgttacccaacttaatcgccttgcagcacatccccctttcgccagctggcgtaatagcgaagaggcccgcaccgatcgcccttcccaacagttgcgcagcctgaatggcgaatggcgctttgcctggtttccggcaccagaagcggtgccggaaagctggctggagtgcgatcttcctgaggccgatactgtcgtcgtcccctcaaactggcagatgcacggttacgatgcgcccatctacaccaacgtgacctatcccattacggtcaatccgccgtttgttcccacggagaatccgacgggttgttactcgctcacatttaatgttgatgaaagctggctacaggaaggccagacgcgaattatttttgatggcgttaactcggcgtttcatctgtggtgcaacgggcgctgggtcggttacggccaggacagtcgtttgccgtctgaatttgacctgagcgcatttttacgcgccggagaaaaccgcctcgcggtgatggtgctgcgctggagtgacggcagttatctggaagatcaggatatgtggcggatgagcggcattttccgtgacgtctcgttgctgcataaaccgactacacaaatcagcgatttccatgttgccactcgctttaatgatgatttcagccgcgctgtactggaggctgaagttcagatgtgcggcgagttgcgtgactacctacgggtaacagtttctttatggcagggtgaaacgcaggtcgccagcggcaccgcgcctttcggcggtgaaattatcgatgagcgtggtggttatgccgatcgcgtcacactacgtctgaacgtcgaaaacccgaaactgtggagcgccgaaatcccgaatctctatcgtgcggtggttgaactgcacaccgccgacggcacgctgattgaagcagaagcctgcgatgtcggtttccgcgaggtgcggattgaaaatggtctgctgctgctgaacggcaagccgttgctgattcgaggcgttaaccgtcacgagcatcatcctctgcatggtcaggtcatggatgagcagacgatggtgcaggatatcctgctgatgaagcagaacaactttaacgccgtgcgctgttcgcattatccgaaccatccgctgtggtacacgctgtgcgaccgctacggcctgtatgtggtggatgaagccaatattgaaacccacggcatggtgccaatgaatcgtctgaccgatgatccgcgctggctaccggcgatgagcgaacgcgtaacgcgaatggtgcagcgcgatcgtaatcacccgagtgtgatcatctggtcgctggggaatgaatcaggccacggcgctaatcacgacgcgctgtatcgctggatcaaatctgtcgatccttcccgcccggtgcagtatgaaggcggcggagccgacaccacggccaccgatattatttgcccgatgtacgcgcgcgtggatgaagaccagcccttcccggctgtgccgaaatggtccatcaaaaaatggctttcgctacctggagagacgcgcccgctgatcctttgcgaatacgcccacgcgatgggtaacagtcttggcggtttcgctaaatactggcaggcgtttcgtcagtatccccgtttacagggcggcttcgtctgggactgggtggatcagtcgctgattaaatatgatgaaaacggcaacccgtggtcggcttacggcggtgattttggcgatacgccgaacgatcgccagttctgtatgaacggtctggtctttgccgaccgcacgccgcatccagcgctgacggaagcaaaacaccagcagcagtttttccagttccgtttatccgggcaaaccatcgaagtgaccagcgaatacctgttccgtcatagcgataacgagctcctgcactggatggtggcgctggatggtaagccgctggcaagcggtgaagtgcctctggatgtcgctccacaaggtaaacagttgattgaactgcctgaactaccgcagccggagagcgccgggcaactctggctcacagtacgcgtagtgcaaccgaacgcgaccgcatggtcagaagccgggcacatcagcgcctggcagcagtggcgtctggcggaaaacctcagtgtgacgctccccgccgcgtcccacgccatcccgcatctgaccaccagcgaaatggatttttgcatcgagctgggtaataagcgttggcaatttaaccgccagtcaggctttctttcacagatgtggattggcgataaaaaacaactgctgacgccgctgcgcgatcagttcacccgtgcaccgctggataacgacattggcgtaagtgaagcgacccgcattgaccctaacgcctgggtcgaacgctggaaggcggcgggccattaccaggccgaagcagcgttgttgcagtgcacggcagatacacttgctgatgcggtgctgattacgaccgctcacgcgtggcagcatcaggggaaaaccttatttatcagccggaaaacctaccggattgatggtagtggtcaaatggcgattaccgttgatgttgaagtggcgagcgatacaccgcatccggcgcggattggcctgaactgccagctggcgcaggtagcagagcgggtaaactggctcggattagggccgcaagaaaactatcccgaccgccttactgccgcctgttttgaccgctgggatctgccattgtcagacatgtataccccgtacgtcttcccgagcgaaaacggtctgcgctgcgggacgcgcgaattgaattatggcccacaccagtggcgcggcgacttccagttcaacatcagccgctacagtcaacagcaactgatggaaaccagccatcgccatctgctgcacgcggaagaaggcacatggctgaatatcgacggtttccatatggggattggtggcgacgactcctggagcccgtcagtatcggcggaattccagctgagcgccggtcgctaccattaccagttggtctggtgtcaaaaataagcctgatacagattaaatcagaacgcagaagcggtctgataaaacagaatttgcctggcggcagtagcgcggtggtcccacctgaccccatgccgaactcagaagtgaaacgccgtagcgccgatggtagtgtggggtctccccatgcgagagtagggaactgccaggcatcaaataaaacgaaaggctcagtcgaaagactgggcctttcgttttatctgttgtttgtcggtgaacgctctcctgagtaggacaaatccgccgggagcggatttgaacgttgcgaagcaacggcccggagggtggcgggcaggacgcccgccataaactgccaggcatcaaattaagcagaaggccatcctgacggatggcctttttgcgtttctacaaactcttttgtttatttttctaaatacattcaaatatgtatccgctcatgagacaataaccctgataaatgcttcaataatattgaaaaaggaagagtatgagtattcaacatttccgtgtcgcccttattcccttttttgcggcattttgccttcctgtttttgctcacccagaaacgctggtgaaagtaaaagatgctgaagatcagttgggtgcacgagtgggttacatcgaactggatctcaacagcggtaagatccttgagagttttcgccccgaagaacgttttccaatgatgagcacttttaaagttctgctatgtggcgcggtattatcccgtgttgacgccgggcaagagcaactcggtcgccgcatacactattctcagaatgacttggttgagtactcaccagtcacagaaaagcatcttacggatggcatgacagtaagagaattatgcagtgctgccataaccatgagtgataacactgcggccaacttacttctgacaacgatcggaggaccgaaggagctaaccgcttttttgcacaacatgggggatcatgtaactcgccttgatcgttgggaaccggagctgaatgaagccataccaaacgacgagcgtgacaccacgatgcctgtagcaatggcaacaacgttgcgcaaactattaactggcgaactacttactctagcttcccggcaacaattaatagactggatggaggcggataaagttgcaggaccacttctgcgctcggcccttccggctggctggtttattgctgataaatctggagccggtgagcgtgggtctcgcggtatcattgcagcactggggccagatggtaagccctcccgtatcgtagttatctacacgacggggagtcaggcaactatggatgaacgaaatagacagatcgctgagataggtgcctcactgattaagcattggtaactgtcagaccaagtttactcatatatactttagattgatttacgcgccctgtagcggcgcattaagcgcggcgggtgtggtggttacgcgcagcgtgaccgctacacttgccagcgccctagcgcccgctcctttcgctttcttcccttcctttctcgccacgttcgccggctttccccgtcaagctctaaatcgggggctccctttagggttccgatttagtgctttacggcacctcgaccccaaaaaacttgatttgggtgatggttcacgtagtgggccatcgccctgatagacggtttttcgccctttgacgttggagtccacgttctttaatagtggactcttgttccaaacttgaacaacactcaaccctatctcgggctattcttttgatttataagggattttgccgatttcggcctattggttaaaaaatgagctgatttaacaaaaatttaacgcgaattttaacaaaatattaacgtttacaatttaaaaggatctaggtgaagatcctttttgataatctcatgaccaaaatcccttaacgtgagttttcgttccactgagcgtcagaccccgtagaaaagatcaaaggatcttcttgagatcctttttttctgcgcgtaatctgctgcttgcaaacaaaaaaaccaccgctaccagcggtggtttgtttgccggatcaagagctaccaactctttttccgaaggtaactggcttcagcagagcgcagataccaaatactgtccttctagtgtagccgtagttaggccaccacttcaagaactctgtagcaccgcctacatacctcgctctgctaatcctgttaccagtggctgctgccagtggcgataagtcgtgtcttaccgggttggactcaagacgatagttaccggataaggcgcagcggtcgggctgaacggggggttcgtgcacacagcccagcttggagcgaacgacctacaccgaactgagatacctacagcgtgagctatgagaaagcgccacgcttcccgaagggagaaaggcggacaggtatccggtaagcggcagggtcggaacaggagagcgcacgagggagcttccagggggaaacgcctggtatctttatagtcctgtcgggtttcgccacctctgacttgagcgtcgatttttgtgatgctcgtcaggggggcggagcctatggaaaaacgccagcaacgcggcctttttacggttcctggccttttgctggccttttgctcacatgttctttcctgcgttatcccctgattctgtggataaccgtattaccgcctttgagtgagctgataccgctcgccgcagccgaacgaccgagcgcagcgagtcagtgagcgaggaagcggaagagcgcctgatgcggtattttctccttacgcatctgtgcggtatttcacaccgcatagggtcatggctgcgccccgacacccgccaacacccgctgacgcgccctgacgggcttgtctgctcccggcatccgcttacagacaagctgtgaccgtctccgggagctgcatgtgtcagaggttttcaccgtcatcaccgaaacgcgcgaggcagcaaggagatggcgcccaacagtcccccggccacggggcctgccaccatacccacgccgaaacaagcgctcatgagcccgaagtggcgagcccgatcttccccatcggtgatgtcggcgatataggcgccagcaaccgcacctgtggcgccggtgatgccggccacgatgcgtccggcgtagaggatctgctcatgtttgacagcttatc

SEQ ID NO: 5645 - DNA, 6351 bp, Artificial Sequence
  Description of Artificial Sequence: Synthetic polynucleotide
ctcgagtcgcatcattgttgagtttttcggtgtgctgctgagctaaaagtgtgtctgctcgaatggtgataccaaggatatgtgctacacctaaaaactaagtaatatttagtttcggtgttcttatgagggggaccatgattacggattcactggccgtcgttttacaacgtcgtgactgggaaaaccctggcgttacccaacttaatcgccttgcagcacatccccctttcgccagctggcgtaatagcgaagaggcccgcaccgatcgcccttcccaacagttgcgcagcctgaatggcgaatggcgctttgcctggtttccggcaccagaagcggtgccggaaagctggctggagtgcgatcttcctgaggccgatactgtcgtcgtcccctcaaactggcagatgcacggttacgatgcgcccatctacaccaacgtgacctatcccattacggtcaatccgccgtttgttcccacggagaatccgacgggttgttactcgctcacatttaatgttgatgaaagctggctacaggaaggccagacgcgaattatttttgatggcgttaactcggcgtttcatctgtggtgcaacgggcgctgggtcggttacggccaggacagtcgtttgccgtctgaatttgacctgagcgcatttttacgcgccggagaaaaccgcctcgcggtgatggtgctgcgctggagtgacggcagttatctggaagatcaggatatgtggcggatgagcggcattttccgtgacgtctcgttgctgcataaaccgactacacaaatcagcgatttccatgttgccactcgctttaatgatgatttcagccgcgctgtactggaggctgaagttcagatgtgcggcgagttgcgtgactacctacgggtaacagtttctttatggcagggtgaaacgcaggtcgccagcggcaccgcgcctttcggcggtgaaattatcgatgagcgtggtggttatgccgatcgcgtcacactacgtctgaacgtcgaaaacccgaaactgtggagcgccgaaatcccgaatctctatcgtgcggtggttgaactgcacaccgccgacggcacgctgattgaagcagaagcctgcgatgtcggtttccgcgaggtgcggattgaaaatggtctgctgctgctgaacggcaagccgttgctgattcgaggcgttaaccgtcacgagcatcatcctctgcatggtcaggtcatggatgagcagacgatggtgcaggatatcctgctgatgaagcagaacaactttaacgccgtgcgctgttcgcattatccgaaccatccgctgtggtacacgctgtgcgaccgctacggcctgtatgtggtggatgaagccaatattgaaacccacggcatggtgccaatgaatcgtctgaccgatgatccgcgctggctaccggcgatgagcgaacgcgtaacgcgaatggtgcagcgcgatcgtaatcacccgagtgtgatcatctggtcgctggggaatgaatcaggccacggcgctaatcacgacgcgctgtatcgctggatcaaatctgtcgatccttcccgcccggtgcagtatgaaggcggcggagccgacaccacggccaccgatattatttgcccgatgtacgcgcgcgtggatgaagaccagcccttcccggctgtgccgaaatggtccatcaaaaaatggctttcgctacctggagagacgcgcccgctgatcctttgcgaatacgcccacgcgatgggtaacagtcttggcggtttcgctaaatactggcaggcgtttcgtcagtatccccgtttacagggcggcttcgtctgggactgggtggatcagtcgctgattaaatatgatgaaaacggcaacccgtggtcggcttacggcggtgattttggcgatacgccgaacgatcgccagttctgtatgaacggtctggtctttgccgaccgcacgccgcatccagcgctgacggaagcaaaacaccagcagcagtttttccagttccgtttatccgggcaaaccatcgaagtgaccagcgaatacctgttccgtcatagcgataacgagctcctgcactggatggtggcgctggatggtaagccgctggcaagcggtgaagtgcctctggatgtcgctccacaaggtaaacagttgattgaactgcctgaactaccgcagccggagagcgccgggcaactctggctcacagtacgcgtagtgcaaccgaacgcgaccgcatggtcagaagccgggcacatcagcgcctggcagcagtggcgtctggcggaaaacctcagtgtgacgctccccgccgcgtcccacgccatcccgcatctgaccaccagcgaaatggatttttgcatcgagctgggtaataagcgttggcaatttaaccgccagtcaggctttctttcacagatgtggattggcgataaaaaacaactgctgacgccgctgcgcgatcagttcacccgtgcaccgctggataacgacattggcgtaagtgaagcgacccgcattgaccctaacgcctgggtcgaacgctggaaggcggcgggccattaccaggccgaagcagcgttgttgcagtgcacggcagatacacttgctgatgcggtgctgattacgaccgctcacgcgtggcagcatcaggggaaaaccttatttatcagccggaaaacctaccggattgatggtagtggtcaaatggcgattaccgttgatgttgaagtggcgagcgatacaccgcatccggcgcggattggcctgaactgccagctggcgcaggtagcagagcgggtaaactggctcggattagggccgcaagaaaactatcccgaccgccttactgccgcctgttttgaccgctgggatctgccattgtcagacatgtataccccgtacgtcttcccgagcgaaaacggtctgcgctgcgggacgcgcgaattgaattatggcccacaccagtggcgcggcgacttccagttcaacatcagccgctacagtcaacagcaactgatggaaaccagccatcgccatctgctgcacgcggaagaaggcacatggctgaatatcgacggtttccatatggggattggtggcgacgactcctggagcccgtcagtatcggcggaattccagctgagcgccggtcgctaccattaccagttggtctggtgtcaaaaataagcctgatacagattaaatcagaacgcagaagcggtctgataaaacagaatttgcctggcggcagtagcgcggtggtcccacctgaccccatgccgaactcagaagtgaaacgccgtagcgccgatggtagtgtggggtctccccatgcgagagtagggaactgccaggcatcaaataaaacgaaaggctcagtcgaaagactgggcctttcgttttatctgttgtttgtcggtgaacgctctcctgagtaggacaaatccgccgggagcggatttgaacgttgcgaagcaacggcccggagggtggcgggcaggacgcccgccataaactgccaggcatcaaattaagcagaaggccatcctgacggatggcctttttgcgtttctacaaactcttttgtttatttttctaaatacattcaaatatgtatccgctcatgagacaataaccctgataaatgcttcaataatattgaaaaaggaagagtatgagtattcaacatttccgtgtcgcccttattcccttttttgcggcattttgccttcctgtttttgctcacccagaaacgctggtgaaagtaaaagatgctgaagatcagttgggtgcacgagtgggttacatcgaactggatctcaacagcggtaagatccttgagagttttcgccccgaagaacgttttccaatgatgagcacttttaaagttctgctatgtggcgcggtattatcccgtgttgacgccgggcaagagcaactcggtcgccgcatacactattctcagaatgacttggttgagtactcaccagtcacagaaaagcatcttacggatggcatgacagtaagagaattatgcagtgctgccataaccatgagtgataacactgcggccaacttacttctgacaacgatcggaggaccgaaggagctaaccgcttttttgcacaacatgggggatcatgtaactcgccttgatcgttgggaaccggagctgaatgaagccataccaaacgacgagcgtgacaccacgatgcctgtagcaatggcaacaacgttgcgcaaactattaactggcgaactacttactctagcttcccggcaacaattaatagactggatggaggcggataaagttgcaggaccacttctgcgctcggcccttccggctggctggtttattgctgataaatctggagccggtgagcgtgggtctcgcggtatcattgcagcactggggccagatggtaagccctcccgtatcgtagttatctacacgacggggagtcaggcaactatggatgaacgaaatagacagatcgctgagataggtgcctcactgattaagcattggtaactgtcagaccaagtttactcatatatactttagattgatttacgcgccctgtagcggcgcattaagcgcggcgggtgtggtggttacgcgcagcgtgaccgctacacttgccagcgccctagcgcccgctcctttcgctttcttcccttcctttctcgccacgttcgccggctttccccgtcaagctctaaatcgggggctccctttagggttccgatttagtgctttacggcacctcgaccccaaaaaacttgatttgggtgatggttcacgtagtgggccatcgccctgatagacggtttttcgccctttgacgttggagtccacgttctttaatagtggactcttgttccaaacttgaacaacactcaaccctatctcgggctattcttttgatttataagggattttgccgatttcggcctattggttaaaaaatgagctgatttaacaaaaatttaacgcgaattttaacaaaatattaacgtttacaatttaaaaggatctaggtgaagatcctttttgataatctcatgaccaaaatcccttaacgtgagttttcgttccactgagcgtcagaccccgtagaaaagatcaaaggatcttcttgagatcctttttttctgcgcgtaatctgctgcttgcaaacaaaaaaaccaccgctaccagcggtggtttgtttgccggatcaagagctaccaactctttttccgaaggtaactggcttcagcagagcgcagataccaaatactgtccttctagtgtagccgtagttaggccaccacttcaagaactctgtagcaccgcctacatacctcgctctgctaatcctgttaccagtggctgctgccagtggcgataagtcgtgtcttaccgggttggactcaagacgatagttaccggataaggcgcagcggtcgggctgaacggggggttcgtgcacacagcccagcttggagcgaacgacctacaccgaactgagatacctacagcgtgagctatgagaaagcgccacgcttcccgaagggagaaaggcggacaggtatccggtaagcggcagggtcggaacaggagagcgcacgagggagcttccagggggaaacgcctggtatctttatagtcctgtcgggtttcgccacctctgacttgagcgtcgatttttgtgatgctcgtcaggggggcggagcctatggaaaaacgccagcaacgcggcctttttacggttcctggccttttgctggccttttgctcacatgttctttcctgcgttatcccctgattctgtggataaccgtattaccgcctttgagtgagctgataccgctcgccgcagccgaacgaccgagcgcagcgagtcagtgagcgaggaagcggaagagcgcctgatgcggtattttctccttacgcatctgtgcggtatttcacaccgcatagggtcatggctgcgccccgacacccgccaacacccgctgacgcgccctgacgggcttgtctgctcccggcatccgcttacagacaagctgtgaccgtctccgggagctgcatgtgtcagaggttttcaccgtcatcaccgaaacgcgcgaggcagcaaggagatggcgcccaacagtcccccggccacggggcctgccaccatacccacgccgaaacaagcgctcatgagcccgaagtggcgagcccgatcttccccatcggtgatgtcggcgatataggcgccagcaaccgcacctgtggcgccggtgatgccggccacgatgcgtccggcgtagaggatctgctcatgtttgacagcttatc

SEQ ID NO: 5646 - DNA, 6373 bp, Artificial Sequence
  Description of Artificial Sequence: Synthetic polynucleotide
ctcgaggctctggcaggatgtttcgtaatttccgctgagcattaaaaactaagtattgcttagtacacttgttcgtataagaagaagagaatcttagctacctgatcctcagctagcagagaccccatgacaaacccattacccatcagaagggggaccatgattacggattcactggccgtcgttttacaacgtcgtgactgggaaaaccctggcgttacccaacttaatcgccttgcagcacatccccctttcgccagctggcgtaatagcgaagaggcccgcaccgatcgcccttcccaacagttgcgcagcctgaatggcgaatggcgctttgcctggtttccggcaccagaagcggtgccggaaagctggctggagtgcgatcttcctgaggccgatactgtcgtcgtcccctcaaactggcagatgcacggttacgatgcgcccatctacaccaacgtgacctatcccattacggtcaatccgccgtttgttcccacggagaatccgacgggttgttactcgctcacatttaatgttgatgaaagctggctacaggaaggccagacgcgaattatttttgatggcgttaactcggcgtttcatctgtggtgcaacgggcgctgggtcggttacggccaggacagtcgtttgccgtctgaatttgacctgagcgcatttttacgcgccggagaaaaccgcctcgcggtgatggtgctgcgctggagtgacggcagttatctggaagatcaggatatgtggcggatgagcggcattttccgtgacgtctcgttgctgcataaaccgactacacaaatcagcgatttccatgttgccactcgctttaatgatgatttcagccgcgctgtactggaggctgaagttcagatgtgcggcgagttgcgtgactacctacgggtaacagtttctttatggcagggtgaaacgcaggtcgccagcggcaccgcgcctttcggcggtgaaattatcgatgagcgtggtggttatgccgatcgcgtcacactacgtctgaacgtcgaaaacccgaaactgtggagcgccgaaatcccgaatctctatcgtgcggtggttgaactgcacaccgccgacggcacgctgattgaagcagaagcctgcgatgtcggtttccgcgaggtgcggattgaaaatggtctgctgctgctgaacggcaagccgttgctgattcgaggcgttaaccgtcacgagcatcatcctctgcatggtcaggtcatggatgagcagacgatggtgcaggatatcctgctgatgaagcagaacaactttaacgccgtgcgctgttcgcattatccgaaccatccgctgtggtacacgctgtgcgaccgctacggcctgtatgtggtggatgaagccaatattgaaacccacggcatggtgccaatgaatcgtctgaccgatgatccgcgctggctaccggcgatgagcgaacgcgtaacgcgaatggtgcagcgcgatcgtaatcacccgagtgtgatcatctggtcgctggggaatgaatcaggccacggcgctaatcacgacgcgctgtatcgctggatcaaatctgtcgatccttcccgcccggtgcagtatgaaggcggcggagccgacaccacggccaccgatattatttgcccgatgtacgcgcgcgtggatgaagaccagcccttcccggctgtgccgaaatggtccatcaaaaaatggctttcgctacctggagagacgcgcccgctgatcctttgcgaatacgcccacgcgatgggtaacagtcttggcggtttcgctaaatactggcaggcgtttcgtcagtatccccgtttacagggcggcttcgtctgggactgggtggatcagtcgctgattaaatatgatgaaaacggcaacccgtggtcggcttacggcggtgattttggcgatacgccgaacgatcgccagttctgtatgaacggtctggtctttgccgaccgcacgccgcatccagcgctgacggaagcaaaacaccagcagcagtttttccagttccgtttatccgggcaaaccatcgaagtgaccagcgaatacctgttccgtcatagcgataacgagctcctgcactggatggtggcgctggatggtaagccgctggcaagcggtgaagtgcctctggatgtcgctccacaaggtaaacagttgattgaactgcctgaactaccgcagccggagagcgccgggcaactctggctcacagtacgcgtagtgcaaccgaacgcgaccgcatggtcagaagccgggcacatcagcgcctggcagcagtggcgtctggcggaaaacctcagtgtgacgctccccgccgcgtcccacgccatcccgcatctgaccaccagcgaaatggatttttgcatcgagctgggtaataagcgttggcaatttaaccgccagtcaggctttctttcacagatgtggattggcgataaaaaacaactgctgacgccgctgcgcgatcagttcacccgtgcaccgctggataacgacattggcgtaagtgaagcgacccgcattgaccctaacgcctgggtcgaacgctggaaggcggcgggccattaccaggccgaagcagcgttgttgcagtgcacggcagatacacttgctgatgcggtgctgattacgaccgctcacgcgtggcagcatcaggggaaaaccttatttatcagccggaaaacctaccggattgatggtagtggtcaaatggcgattaccgttgatgttgaagtggcgagcgatacaccgcatccggcgcggattggcctgaactgccagctggcgcaggtagcagagcgggtaaactggctcggattagggccgcaagaaaactatcccgaccgccttactgccgcctgttttgaccgctgggatctgccattgtcagacatgtataccccgtacgtcttcccgagcgaaaacggtctgcgctgcgggacgcgcgaattgaattatggcccacaccagtggcgcggcgacttccagttcaacatcagccgctacagtcaacagcaactgatggaaaccagccatcgccatctgctgcacgcggaagaaggcacatggctgaatatcgacggtttccatatggggattggtggcgacgactcctggagcccgtcagtatcggcggaattccagctgagcgccggtcgctaccattaccagttggtctggtgtcaaaaataagcctgatacagattaaatcagaacgcagaagcggtctgataaaacagaatttgcctggcggcagtagcgcggtggtcccacctgaccccatgccgaactcagaagtgaaacgccgtagcgccgatggtagtgtggggtctccccatgcgagagtagggaactgccaggcatcaaataaaacgaaaggctcagtcgaaagactgggcctttcgttttatctgttgtttgtcggtgaacgctctcctgagtaggacaaatccgccgggagcggatttgaacgttgcgaagcaacggcccggagggtggcgggcaggacgcccgccataaactgccaggcatcaaattaagcagaaggccatcctgacggatggcctttttgcgtttctacaaactcttttgtttatttttctaaatacattcaaatatgtatccgctcatgagacaataaccctgataaatgcttcaataatattgaaaaaggaagagtatgagtattcaacatttccgtgtcgcccttattcccttttttgcggcattttgccttcctgtttttgctcacccagaaacgctggtgaaagtaaaagatgctgaagatcagttgggtgcacgagtgggttacatcgaactggatctcaacagcggtaagatccttgagagttttcgccccgaagaacgttttccaatgatgagcacttttaaagttctgctatgtggcgcggtattatcccgtgttgacgccgggcaagagcaactcggtcgccgcatacactattctcagaatgacttggttgagtactcaccagtcacagaaaagcatcttacggatggcatgacagtaagagaattatgcagtgctgccataaccatgagtgataacactgcggccaacttacttctgacaacgatcggaggaccgaaggagctaaccgcttttttgcacaacatgggggatcatgtaactcgccttgatcgttgggaaccggagctgaatgaagccataccaaacgacgagcgtgacaccacgatgcctgtagcaatggcaacaacgttgcgcaaactattaactggcgaactacttactctagcttcccggcaacaattaatagactggatggaggcggataaagttgcaggaccacttctgcgctcggcccttccggctggctggtttattgctgataaatctggagccggtgagcgtgggtctcgcggtatcattgcagcactggggccagatggtaagccctcccgtatcgtagttatctacacgacggggagtcaggcaactatggatgaacgaaatagacagatcgctgagataggtgcctcactgattaagcattggtaactgtcagaccaagtttactcatatatactttagattgatttacgcgccctgtagcggcgcattaagcgcggcgggtgtggtggttacgcgcagcgtgaccgctacacttgccagcgccctagcgcccgctcctttcgctttcttcccttcctttctcgccacgttcgccggctttccccgtcaagctctaaatcgggggctccctttagggttccgatttagtgctttacggcacctcgaccccaaaaaacttgatttgggtgatggttcacgtagtgggccatcgccctgatagacggtttttcgccctttgacgttggagtccacgttctttaatagtggactcttgttccaaacttgaacaacactcaaccctatctcgggctattcttttgatttataagggattttgccgatttcggcctattggttaaaaaatgagctgatttaacaaaaatttaacgcgaattttaacaaaatattaacgtttacaatttaaaaggatctaggtgaagatcctttttgataatctcatgaccaaaatcccttaacgtgagttttcgttccactgagcgtcagaccccgtagaaaagatcaaaggatcttcttgagatcctttttttctgcgcgtaatctgctgcttgcaaacaaaaaaaccaccgctaccagcggtggtttgtttgccggatcaagagctaccaactctttttccgaaggtaactggcttcagcagagcgcagataccaaatactgtccttctagtgtagccgtagttaggccaccacttcaagaactctgtagcaccgcctacatacctcgctctgctaatcctgttaccagtggctgctgccagtggcgataagtcgtgtcttaccgggttggactcaagacgatagttaccggataaggcgcagcggtcgggctgaacggggggttcgtgcacacagcccagcttggagcgaacgacctacaccgaactgagatacctacagcgtgagctatgagaaagcgccacgcttcccgaagggagaaaggcggacaggtatccggtaagcggcagggtcggaacaggagagcgcacgagggagcttccagggggaaacgcctggtatctttatagtcctgtcgggtttcgccacctctgacttgagcgtcgatttttgtgatgctcgtcaggggggcggagcctatggaaaaacgccagcaacgcggcctttttacggttcctggccttttgctggccttttgctcacatgttctttcctgcgttatcccctgattctgtggataaccgtattaccgcctttgagtgagctgataccgctcgccgcagccgaacgaccgagcgcagcgagtcagtgagcgaggaagcggaagagcgcctgatgcggtattttctccttacgcatctgtgcggtatttcacaccgcatagggtcatggctgcgccccgacacccgccaacacccgctgacgcgccctgacgggcttgtctgctcccggcatccgcttacagacaagctgtgaccgtctccgggagctgcatgtgtcagaggttttcaccgtcatcaccgaaacgcgcgaggcagcaaggagatggcgcccaacagtcccccggccacggggcctgccaccatacccacgccgaaacaagcgctcatgagcccgaagtggcgagcccgatcttccccatcggtgatgtcggcgatataggcgccagcaaccgcacctgtggcgccggtgatgccggccacgatgcgtccggcgtagaggatctgctcatgtttgacagcttatc

SEQ ID NO: 5647 - DNA, 6351 bp, Artificial Sequence
  Description of Artificial Sequence: Synthetic polynucleotide
ctcgagtcgcatcattgttgagtttttcggtgtgctgctgagctaaaagtgtgtctgctcgaatggtgataccaaggatatgtgctacacctaaaaaagaagtaatatttagtttcggtgttcttatgagggggaccatgattacggattcactggccgtcgttttacaacgtcgtgactgggaaaaccctggcgttacccaacttaatcgccttgcagcacatccccctttcgccagctggcgtaatagcgaagaggcccgcaccgatcgcccttcccaacagttgcgcagcctgaatggcgaatggcgctttgcctggtttccggcaccagaagcggtgccggaaagctggctggagtgcgatcttcctgaggccgatactgtcgtcgtcccctcaaactggcagatgcacggttacgatgcgcccatctacaccaacgtgacctatcccattacggtcaatccgccgtttgttcccacggagaatccgacgggttgttactcgctcacatttaatgttgatgaaagctggctacaggaaggccagacgcgaattatttttgatggcgttaactcggcgtttcatctgtggtgcaacgggcgctgggtcggttacggccaggacagtcgtttgccgtctgaatttgacctgagcgcatttttacgcgccggagaaaaccgcctcgcggtgatggtgctgcgctggagtgacggcagttatctggaagatcaggatatgtggcggatgagcggcattttccgtgacgtctcgttgctgcataaaccgactacacaaatcagcgatttccatgttgccactcgctttaatgatgatttcagccgcgctgtactggaggctgaagttcagatgtgcggcgagttgcgtgactacctacgggtaacagtttctttatggcagggtgaaacgcaggtcgccagcggcaccgcgcctttcggcggtgaaattatcgatgagcgtggtggttatgccgatcgcgtcacactacgtctgaacgtcgaaaacccgaaactgtggagcgccgaaatcccgaatctctatcgtgcggtggttgaactgcacaccgccgacggcacgctgattgaagcagaagcctgcgatgtcggtttccgcgaggtgcggattgaaaatggtctgctgctgctgaacggcaagccgttgctgattcgaggcgttaaccgtcacgagcatcatcctctgcatggtcaggtcatggatgagcagacgatggtgcaggatatcctgctgatgaagcagaacaactttaacgccgtgcgctgttcgcattatccgaaccatccgctgtggtacacgctgtgcgaccgctacggcctgtatgtggtggatgaagccaatattgaaacccacggcatggtgccaatgaatcgtctgaccgatgatccgcgctggctaccggcgatgagcgaacgcgtaacgcgaatggtgcagcgcgatcgtaatcacccgagtgtgatcatctggtcgctggggaatgaatcaggccacggcgctaatcacgacgcgctgtatcgctggatcaaatctgtcgatccttcccgcccggtgcagtatgaaggcggcggagccgacaccacggccaccgatattatttgcccgatgtacgcgcgcgtggatgaagaccagcccttcccggctgtgccgaaatggtccatcaaaaaatggctttcgctacctggagagacgcgcccgctgatcctttgcgaatacgcccacgcgatgggtaacagtcttggcggtttcgctaaatactggcaggcgtttcgtcagtatccccgtttacagggcggcttcgtctgggactgggtggatcagtcgctgattaaatatgatgaaaacggcaacccgtggtcggcttacggcggtgattttggcgatacgccgaacgatcgccagttctgtatgaacggtctggtctttgccgaccgcacgccgcatccagcgctgacggaagcaaaacaccagcagcagtttttccagttccgtttatccgggcaaaccatcgaagtgaccagcgaatacctgttccgtcatagcgataacgagctcctgcactggatggtggcgctggatggtaagccgctggcaagcggtgaagtgcctctggatgtcgctccacaaggtaaacagttgattgaactgcctgaactaccgcagccggagagcgccgggcaactctggctcacagtacgcgtagtgcaaccgaacgcgaccgcatggtcagaagccgggcacatcagcgcctggcagcagtggcgtctggcggaaaacctcagtgtgacgctccccgccgcgtcccacgccatcccgcatctgaccaccagcgaaatggatttttgcatcgagctgggtaataagcgttggcaatttaaccgccagtcaggctttctttcacagatgtggattggcgataaaaaacaactgctgacgccgctgcgcgatcagttcacccgtgcaccgctggataacgacattggcgtaagtgaagcgacccgcattgaccctaacgcctgggtcgaacgctggaaggcggcgggccattaccaggccgaagcagcgttgttgcagtgcacggcagatacacttgctgatgcggtgctgattacgaccgctcacgcgtggcagcatcaggggaaaaccttatttatcagccggaaaacctaccggattgatggtagtggtcaaatggcgattaccgttgatgttgaagtggcgagcgatacaccgcatccggcgcggattggcctgaactgccagctggcgcaggtagcagagcgggtaaactggctcggattagggccgcaagaaaactatcccgaccgccttactgccgcctgttttgaccgctgggatctgccattgtcagacatgtataccccgtacgtcttcccgagcgaaaacggtctgcgctgcgggacgcgcgaattgaattatggcccacaccagtggcgcggcgacttccagttcaacatcagccgctacagtcaacagcaactgatggaaaccagccatcgccatctgctgcacgcggaagaaggcacatggctgaatatcgacggtttccatatggggattggtggcgacgactcctggagcccgtcagtatcggcggaattccagctgagcgccggtcgctaccattaccagttggtctggtgtcaaaaataagcctgatacagattaaatcagaacgcagaagcggtctgataaaacagaatttgcctggcggcagtagcgcggtggtcccacctgaccccatgccgaactcagaagtgaaacgccgtagcgccgatggtagtgtggggtctccccatgcgagagtagggaactgccaggcatcaaataaaacgaaaggctcagtcgaaagactgggcctttcgttttatctgttgtttgtcggtgaacgctctcctgagtaggacaaatccgccgggagcggatttgaacgttgcgaagcaacggcccggagggtggcgggcaggacgcccgccataaactgccaggcatcaaattaagcagaaggccatcctgacggatggcctttttgcgtttctacaaactcttttgtttatttttctaaatacattcaaatatgtatccgctcatgagacaataaccctgataaatgcttcaataatattgaaaaaggaagagtatgagtattcaacatttccgtgtcgcccttattcccttttttgcggcattttgccttcctgtttttgctcacccagaaacgctggtgaaagtaaaagatgctgaagatcagttgggtgcacgagtgggttacatcgaactggatctcaacagcggtaagatccttgagagttttcgccccgaagaacgttttccaatgatgagcacttttaaagttctgctatgtggcgcggtattatcccgtgttgacgccgggcaagagcaactcggtcgccgcatacactattctcagaatgacttggttgagtactcaccagtcacagaaaagcatcttacggatggcatgacagtaagagaattatgcagtgctgccataaccatgagtgataacactgcggccaacttacttctgacaacgatcggaggaccgaaggagctaaccgcttttttgcacaacatgggggatcatgtaactcgccttgatcgttgggaaccggagctgaatgaagccataccaaacgacgagcgtgacaccacgatgcctgtagcaatggcaacaacgttgcgcaaactattaactggcgaactacttactctagcttcccggcaacaattaatagactggatggaggcggataaagttgcaggaccacttctgcgctcggcccttccggctggctggtttattgctgataaatctggagccggtgagcgtgggtctcgcggtatcattgcagcactggggccagatggtaagccctcccgtatcgtagttatctacacgacggggagtcaggcaactatggatgaacgaaatagacagatcgctgagataggtgcctcactgattaagcattggtaactgtcagaccaagtttactcatatatactttagattgatttacgcgccctgtagcggcgcattaagcgcggcgggtgtggtggttacgcgcagcgtgaccgctacacttgccagcgccctagcgcccgctcctttcgctttcttcccttcctttctcgccacgttcgccggctttccccgtcaagctctaaatcgggggctccctttagggttccgatttagtgctttacggcacctcgaccccaaaaaacttgatttgggtgatggttcacgtagtgggccatcgccctgatagacggtttttcgccctttgacgttggagtccacgttctttaatagtggactcttgttccaaacttgaacaacactcaaccctatctcgggctattcttttgatttataagggattttgccgatttcggcctattggttaaaaaatgagctgatttaacaaaaatttaacgcgaattttaacaaaatattaacgtttacaatttaaaaggatctaggtgaagatcctttttgataatctcatgaccaaaatcccttaacgtgagttttcgttccactgagcgtcagaccccgtagaaaagatcaaaggatcttcttgagatcctttttttctgcgcgtaatctgctgcttgcaaacaaaaaaaccaccgctaccagcggtggtttgtttgccggatcaagagctaccaactctttttccgaaggtaactggcttcagcagagcgcagataccaaatactgtccttctagtgtagccgtagttaggccaccacttcaagaactctgtagcaccgcctacatacctcgctctgctaatcctgttaccagtggctgctgccagtggcgataagtcgtgtcttaccgggttggactcaagacgatagttaccggataaggcgcagcggtcgggctgaacggggggttcgtgcacacagcccagcttggagcgaacgacctacaccgaactgagatacctacagcgtgagctatgagaaagcgccacgcttcccgaagggagaaaggcggacaggtatccggtaagcggcagggtcggaacaggagagcgcacgagggagcttccagggggaaacgcctggtatctttatagtcctgtcgggtttcgccacctctgacttgagcgtcgatttttgtgatgctcgtcaggggggcggagcctatggaaaaacgccagcaacgcggcctttttacggttcctggccttttgctggccttttgctcacatgttctttcctgcgttatcccctgattctgtggataaccgtattaccgcctttgagtgagctgataccgctcgccgcagccgaacgaccgagcgcagcgagtcagtgagcgaggaagcggaagagcgcctgatgcggtattttctccttacgcatctgtgcggtatttcacaccgcatagggtcatggctgcgccccgacacccgccaacacccgctgacgcgccctgacgggcttgtctgctcccggcatccgcttacagacaagctgtgaccgtctccgggagctgcatgtgtcagaggttttcaccgtcatcaccgaaacgcgcgaggcagcaaggagatggcgcccaacagtcccccggccacggggcctgccaccatacccacgccgaaacaagcgctcatgagcccgaagtggcgagcccgatcttccccatcggtgatgtcggcgatataggcgccagcaaccgcacctgtggcgccggtgatgccggccacgatgcgtccggcgtagaggatctgctcatgtttgacagcttatc

SEQ ID NO: 5648 - DNA, 6365 bp, Artificial Sequence
  Description of Artificial Sequence: Synthetic polynucleotide
ctcgattaaggcctcacttagcaactctcgacagtagatttgaacatagaaaaataaatgcggattatagtccgtggaaaagttctcttcaagaatagatagtctttctttttaatgtacttttgaaatgagagacttagcagatgggaccatgattacggattcactggccgtcgttttacaacgtcgtgactgggaaaaccctggcgttacccaacttaatcgccttgcagcacatccccctttcgccagctggcgtaatagcgaagaggcccgcaccgatcgcccttcccaacagttgcgcagcctgaatggcgaatggcgctttgcctggtttccggcaccagaagcggtgccggaaagctggctggagtgcgatcttcctgaggccgatactgtcgtcgtcccctcaaactggcagatgcacggttacgatgcgcccatctacaccaacgtgacctatcccattacggtcaatccgccgtttgttcccacggagaatccgacgggttgttactcgctcacatttaatgttgatgaaagctggctacaggaaggccagacgcgaattatttttgatggcgttaactcggcgtttcatctgtggtgcaacgggcgctgggtcggttacggccaggacagtcgtttgccgtctgaatttgacctgagcgcatttttacgcgccggagaaaaccgcctcgcggtgatggtgctgcgctggagtgacggcagttatctggaagatcaggatatgtggcggatgagcggcattttccgtgacgtctcgttgctgcataaaccgactacacaaatcagcgatttccatgttgccactcgctttaatgatgatttcagccgcgctgtactggaggctgaagttcagatgtgcggcgagttgcgtgactacctacgggtaacagtttctttatggcagggtgaaacgcaggtcgccagcggcaccgcgcctttcggcggtgaaattatcgatgagcgtggtggttatgccgatcgcgtcacactacgtctgaacgtcgaaaacccgaaactgtggagcgccgaaatcccgaatctctatcgtgcggtggttgaactgcacaccgccgacggcacgctgattgaagcagaagcctgcgatgtcggtttccgcgaggtgcggattgaaaatggtctgctgctgctgaacggcaagccgttgctgattcgaggcgttaaccgtcacgagcatcatcctctgcatggtcaggtcatggatgagcagacgatggtgcaggatatcctgctgatgaagcagaacaactttaacgccgtgcgctgttcgcattatccgaaccatccgctgtggtacacgctgtgcgaccgctacggcctgtatgtggtggatgaagccaatattgaaacccacggcatggtgccaatgaatcgtctgaccgatgatccgcgctggctaccggcgatgagcgaacgcgtaacgcgaatggtgcagcgcgatcgtaatcacccgagtgtgatcatctggtcgctggggaatgaatcaggccacggcgctaatcacgacgcgctgtatcgctggatcaaatctgtcgatccttcccgcccggtgcagtatgaaggcggcggagccgacaccacggccaccgatattatttgcccgatgtacgcgcgcgtggatgaagaccagcccttcccggctgtgccgaaatggtccatcaaaaaatggctttcgctacctggagagacgcgcccgctgatcctttgcgaatacgcccacgcgatgggtaacagtcttggcggtttcgctaaatactggcaggcgtttcgtcagtatccccgtttacagggcggcttcgtctgggactgggtggatcagtcgctgattaaatatgatgaaaacggcaacccgtggtcggcttacggcggtgattttggcgatacgccgaacgatcgccagttctgtatgaacggtctggtctttgccgaccgcacgccgcatccagcgctgacggaagcaaaacaccagcagcagtttttccagttccgtttatccgggcaaaccatcgaagtgaccagcgaatacctgttccgtcatagcgataacgagctcctgcactggatggtggcgctggatggtaagccgctggcaagcggtgaagtgcctctggatgtcgctccacaaggtaaacagttgattgaactgcctgaactaccgcagccggagagcgccgggcaactctggctcacagtacgcgtagtgcaaccgaacgcgaccgcatggtcagaagccgggcacatcagcgcctggcagcagtggcgtctggcggaaaacctcagtgtgacgctccccgccgcgtcccacgccatcccgcatctgaccaccagcgaaatggatttttgcatcgagctgggtaataagcgttggcaatttaaccgccagtcaggctttctttcacagatgtggattggcgataaaaaacaactgctgacgccgctgcgcgatcagttcacccgtgcaccgctggataacgacattggcgtaagtgaagcgacccgcattgaccctaacgcctgggtcgaacgctggaaggcggcgggccattaccaggccgaagcagcgttgttgcagtgcacggcagatacacttgctgatgcggtgctgattacgaccgctcacgcgtggcagcatcaggggaaaaccttatttatcagccggaaaacctaccggattgatggtagtggtcaaatggcgattaccgttgatgttgaagtggcgagcgatacaccgcatccggcgcggattggcctgaactgccagctggcgcaggtagcagagcgggtaaactggctcggattagggccgcaagaaaactatcccgaccgccttactgccgcctgttttgaccgctgggatctgccattgtcagacatgtataccccgtacgtcttcccgagcgaaaacggtctgcgctgcgggacgcgcgaattgaattatggcccacaccagtggcgcggcgacttccagttcaacatcagccgctacagtcaacagcaactgatggaaaccagccatcgccatctgctgcacgcggaagaaggcacatggctgaatatcgacggtttccatatggggattggtggcgacgactcctggagcccgtcagtatcggcggaattccagctgagcgccggtcgctaccattaccagttggtctggtgtcaaaaataagcctgatacagattaaatcagaacgcagaagcggtctgataaaacagaatttgcctggcggcagtagcgcggtggtcccacctgaccccatgccgaactcagaagtgaaacgccgtagcgccgatggtagtgtggggtctccccatgcgagagtagggaactgccaggcatcaaataaaacgaaaggctcagtcgaaagactgggcctttcgttttatctgttgtttgtcggtgaacgctctcctgagtaggacaaatccgccgggagcggatttgaacgttgcgaagcaacggcccggagggtggcgggcaggacgcccgccataaactgccaggcatcaaattaagcagaaggccatcctgacggatggcctttttgcgtttctacaaactcttttgtttatttttctaaatacattcaaatatgtatccgctcatgagacaataaccctgataaatgcttcaataatattgaaaaaggaagagtatgagtattcaacatttccgtgtcgcccttattcccttttttgcggcattttgccttcctgtttttgctcacccagaaacgctggtgaaagtaaaagatgctgaagatcagttgggtgcacgagtgggttacatcgaactggatctcaacagcggtaagatccttgagagttttcgccccgaagaacgttttccaatgatgagcacttttaaagttctgctatgtggcgcggtattatcccgtgttgacgccgggcaagagcaactcggtcgccgcatacactattctcagaatgacttggttgagtactcaccagtcacagaaaagcatcttacggatggcatgacagtaagagaattatgcagtgctgccataaccatgagtgataacactgcggccaacttacttctgacaacgatcggaggaccgaaggagctaaccgcttttttgcacaacatgggggatcatgtaactcgccttgatcgttgggaaccggagctgaatgaagccataccaaacgacgagcgtgacaccacgatgcctgtagcaatggcaacaacgttgcgcaaactattaactggcgaactacttactctagcttcccggcaacaattaatagactggatggaggcggataaagttgcaggaccacttctgcgctcggcccttccggctggctggtttattgctgataaatctggagccggtgagcgtgggtctcgcggtatcattgcagcactggggccagatggtaagccctcccgtatcgtagttatctacacgacggggagtcaggcaactatggatgaacgaaatagacagatcgctgagataggtgcctcactgattaagcattggtaactgtcagaccaagtttactcatatatactttagattgatttacgcgccctgtagcggcgcattaagcgcggcgggtgtggtggttacgcgcagcgtgaccgctacacttgccagcgccctagcgcccgctcctttcgctttcttcccttcctttctcgccacgttcgccggctttccccgtcaagctctaaatcgggggctccctttagggttccgatttagtgctttacggcacctcgaccccaaaaaacttgatttgggtgatggttcacgtagtgggccatcgccctgatagacggtttttcgccctttgacgttggagtccacgttctttaatagtggactcttgttccaaacttgaacaacactcaaccctatctcgggctattcttttgatttataagggattttgccgatttcggcctattggttaaaaaatgagctgatttaacaaaaatttaacgcgaattttaacaaaatattaacgtttacaatttaaaaggatctaggtgaagatcctttttgataatctcatgaccaaaatcccttaacgtgagttttcgttccactgagcgtcagaccccgtagaaaagatcaaaggatcttcttgagatcctttttttctgcgcgtaatctgctgcttgcaaacaaaaaaaccaccgctaccagcggtggtttgtttgccggatcaagagctaccaactctttttccgaaggtaactggcttcagcagagcgcagataccaaatactgtccttctagtgtagccgtagttaggccaccacttcaagaactctgtagcaccgcctacatacctcgctctgctaatcctgttaccagtggctgctgccagtggcgataagtcgtgtcttaccgggttggactcaagacgatagttaccggataaggcgcagcggtcgggctgaacggggggttcgtgcacacagcccagcttggagcgaacgacctacaccgaactgagatacctacagcgtgagctatgagaaagcgccacgcttcccgaagggagaaaggcggacaggtatccggtaagcggcagggtcggaacaggagagcgcacgagggagcttccagggggaaacgcctggtatctttatagtcctgtcgggtttcgccacctctgacttgagcgtcgatttttgtgatgctcgtcaggggggcggagcctatggaaaaacgccagcaacgcggcctttttacggttcctggccttttgctggccttttgctcacatgttctttcctgcgttatcccctgattctgtggataaccgtattaccgcctttgagtgagctgataccgctcgccgcagccgaacgaccgagcgcagcgagtcagtgagcgaggaagcggaagagcgcctgatgcggtattttctccttacgcatctgtgcggtatttcacaccgcatagggtcatggctgcgccccgacacccgccaacacccgctgacgcgccctgacgggcttgtctgctcccggcatccgcttacagacaagctgtgaccgtctccgggagctgcatgtgtcagaggttttcaccgtcatcaccgaaacgcgcgaggcagcaaggagatggcgcccaacagtcccccggccacggggcctgccaccatacccacgccgaaacaagcgctcatgagcccgaagtggcgagcccgatcttccccatcggtgatgtcggcgatataggcgccagcaaccgcacctgtggcgccggtgatgccggccacgatgcgtccggcgtagaggatctgctcatgtttgacagcttatc

SEQ ID NO: 5649 - DNA, 6358 bp, Artificial Sequence
  Description of Artificial Sequence: Synthetic polynucleotide
ctcgagtttaaaaaatcaatactattaccatctccaaacagctaaattcttagctgtttgctttggcattaaatgggggctataatcctcattactactaaaaagtagctgataaccacacaggaaacagctatgagggggaccatgattacggattcactggccgtcgttttacaacgtcgtgactgggaaaaccctggcgttacccaacttaatcgccttgcagcacatccccctttcgccagctggcgtaatagcgaagaggcccgcaccgatcgcccttcccaacagttgcgcagcctgaatggcgaatggcgctttgcctggtttccggcaccagaagcggtgccggaaagctggctggagtgcgatcttcctgaggccgatactgtcgtcgtcccctcaaactggcagatgcacggttacgatgcgcccatctacaccaacgtgacctatcccattacggtcaatccgccgtttgttcccacggagaatccgacgggttgttactcgctcacatttaatgttgatgaaagctggctacaggaaggccagacgcgaattatttttgatggcgttaactcggcgtttcatctgtggtgcaacgggcgctgggtcggttacggccaggacagtcgtttgccgtctgaatttgacctgagcgcatttttacgcgccggagaaaaccgcctcgcggtgatggtgctgcgctggagtgacggcagttatctggaagatcaggatatgtggcggatgagcggcattttccgtgacgtctcgttgctgcataaaccgactacacaaatcagcgatttccatgttgccactcgctttaatgatgatttcagccgcgctgtactggaggctgaagttcagatgtgcggcgagttgcgtgactacctacgggtaacagtttctttatggcagggtgaaacgcaggtcgccagcggcaccgcgcctttcggcggtgaaattatcgatgagcgtggtggttatgccgatcgcgtcacactacgtctgaacgtcgaaaacccgaaactgtggagcgccgaaatcccgaatctctatcgtgcggtggttgaactgcacaccgccgacggcacgctgattgaagcagaagcctgcgatgtcggtttccgcgaggtgcggattgaaaatggtctgctgctgctgaacggcaagccgttgctgattcgaggcgttaaccgtcacgagcatcatcctctgcatggtcaggtcatggatgagcagacgatggtgcaggatatcctgctgatgaagcagaacaactttaacgccgtgcgctgttcgcattatccgaaccatccgctgtggtacacgctgtgcgaccgctacggcctgtatgtggtggatgaagccaatattgaaacccacggcatggtgccaatgaatcgtctgaccgatgatccgcgctggctaccggcgatgagcgaacgcgtaacgcgaatggtgcagcgcgatcgtaatcacccgagtgtgatcatctggtcgctggggaatgaatcaggccacggcgctaatcacgacgcgctgtatcgctggatcaaatctgtcgatccttcccgcccggtgcagtatgaaggcggcggagccgacaccacggccaccgatattatttgcccgatgtacgcgcgcgtggatgaagaccagcccttcccggctgtgccgaaatggtccatcaaaaaatggctttcgctacctggagagacgcgcccgctgatcctttgcgaatacgcccacgcgatgggtaacagtcttggcggtttcgctaaatactggcaggcgtttcgtcagtatccccgtttacagggcggcttcgtctgggactgggtggatcagtcgctgattaaatatgatgaaaacggcaacccgtggtcggcttacggcggtgattttggcgatacgccgaacgatcgccagttctgtatgaacggtctggtctttgccgaccgcacgccgcatccagcgctgacggaagcaaaacaccagcagcagtttttccagttccgtttatccgggcaaaccatcgaagtgaccagcgaatacctgttccgtcatagcgataacgagctcctgcactggatggtggcgctggatggtaagccgctggcaagcggtgaagtgcctctggatgtcgctccacaaggtaaacagttgattgaactgcctgaactaccgcagccggagagcgccgggcaactctggctcacagtacgcgtagtgcaaccgaacgcgaccgcatggtcagaagccgggcacatcagcgcctggcagcagtggcgtctggcggaaaacctcagtgtgacgctccccgccgcgtcccacgccatcccgcatctgaccaccagcgaaatggatttttgcatcgagctgggtaataagcgttggcaatttaaccgccagtcaggctttctttcacagatgtggattggcgataaaaaacaactgctgacgccgctgcgcgatcagttcacccgtgcaccgctggataacgacattggcgtaagtgaagcgacccgcattgaccctaacgcctgggtcgaacgctggaaggcggcgggccattaccaggccgaagcagcgttgttgcagtgcacggcagatacacttgctgatgcggtgctgattacgaccgctcacgcgtggcagcatcaggggaaaaccttatttatcagccggaaaacctaccggattgatggtagtggtcaaatggcgattaccgttgatgttgaagtggcgagcgatacaccgcatccggcgcggattggcctgaactgccagctggcgcaggtagcagagcgggtaaactggctcggattagggccgcaagaaaactatcccgaccgccttactgccgcctgttttgaccgctgggatctgccattgtcagacatgtataccccgtacgtcttcccgagcgaaaacggtctgcgctgcgggacgcgcgaattgaattatggcccacaccagtggcgcggcgacttccagttcaacatcagccgctacagtcaacagcaactgatggaaaccagccatcgccatctgctgcacgcggaagaaggcacatggctgaatatcgacggtttccatatggggattggtggcgacgactcctggagcccgtcagtatcggcggaattccagctgagcgccggtcgctaccattaccagttggtctggtgtcaaaaataagcctgatacagattaaatcagaacgcagaagcggtctgataaaacagaatttgcctggcggcagtagcgcggtggtcccacctgaccccatgccgaactcagaagtgaaacgccgtagcgccgatggtagtgtggggtctccccatgcgagagtagggaactgccaggcatcaaataaaacgaaaggctcagtcgaaagactgggcctttcgttttatctgttgtttgtcggtgaacgctctcctgagtaggacaaatccgccgggagcggatttgaacgttgcgaagcaacggcccggagggtggcgggcaggacgcccgccataaactgccaggcatcaaattaagcagaaggccatcctgacggatggcctttttgcgtttctacaaactcttttgtttatttttctaaatacattcaaatatgtatccgctcatgagacaataaccctgataaatgcttcaataatattgaaaaaggaagagtatgagtattcaacatttccgtgtcgcccttattcccttttttgcggcattttgccttcctgtttttgctcacccagaaacgctggtgaaagtaaaagatgctgaagatcagttgggtgcacgagtgggttacatcgaactggatctcaacagcggtaagatccttgagagttttcgccccgaagaacgttttccaatgatgagcacttttaaagttctgctatgtggcgcggtattatcccgtgttgacgccgggcaagagcaactcggtcgccgcatacactattctcagaatgacttggttgagtactcaccagtcacagaaaagcatcttacggatggcatgacagtaagagaattatgcagtgctgccataaccatgagtgataacactgcggccaacttacttctgacaacgatcggaggaccgaaggagctaaccgcttttttgcacaacatgggggatcatgtaactcgccttgatcgttgggaaccggagctgaatgaagccataccaaacgacgagcgtgacaccacgatgcctgtagcaatggcaacaacgttgcgcaaactattaactggcgaactacttactctagcttcccggcaacaattaatagactggatggaggcggataaagttgcaggaccacttctgcgctcggcccttccggctggctggtttattgctgataaatctggagccggtgagcgtgggtctcgcggtatcattgcagcactggggccagatggtaagccctcccgtatcgtagttatctacacgacggggagtcaggcaactatggatgaacgaaatagacagatcgctgagataggtgcctcactgattaagcattggtaactgtcagaccaagtttactcatatatactttagattgatttacgcgccctgtagcggcgcattaagcgcggcgggtgtggtggttacgcgcagcgtgaccgctacacttgccagcgccctagcgcccgctcctttcgctttcttcccttcctttctcgccacgttcgccggctttccccgtcaagctctaaatcgggggctccctttagggttccgatttagtgctttacggcacctcgaccccaaaaaacttgatttgggtgatggttcacgtagtgggccatcgccctgatagacggtttttcgccctttgacgttggagtccacgttctttaatagtggactcttgttccaaacttgaacaacactcaaccctatctcgggctattcttttgatttataagggattttgccgatttcggcctattggttaaaaaatgagctgatttaacaaaaatttaacgcgaattttaacaaaatattaacgtttacaatttaaaaggatctaggtgaagatcctttttgataatctcatgaccaaaatcccttaacgtgagttttcgttccactgagcgtcagaccccgtagaaaagatcaaaggatcttcttgagatcctttttttctgcgcgtaatctgctgcttgcaaacaaaaaaaccaccgctaccagcggtggtttgtttgccggatcaagagctaccaactctttttccgaaggtaactggcttcagcagagcgcagataccaaatactgtccttctagtgtagccgtagttaggccaccacttcaagaactctgtagcaccgcctacatacctcgctctgctaatcctgttaccagtggctgctgccagtggcgataagtcgtgtcttaccgggttggactcaagacgatagttaccggataaggcgcagcggtcgggctgaacggggggttcgtgcacacagcccagcttggagcgaacgacctacaccgaactgagatacctacagcgtgagctatgagaaagcgccacgcttcccgaagggagaaaggcggacaggtatccggtaagcggcagggtcggaacaggagagcgcacgagggagcttccagggggaaacgcctggtatctttatagtcctgtcgggtttcgccacctctgacttgagcgtcgatttttgtgatgctcgtcaggggggcggagcctatggaaaaacgccagcaacgcggcctttttacggttcctggccttttgctggccttttgctcacatgttctttcctgcgttatcccctgattctgtggataaccgtattaccgcctttgagtgagctgataccgctcgccgcagccgaacgaccgagcgcagcgagtcagtgagcgaggaagcggaagagcgcctgatgcggtattttctccttacgcatctgtgcggtatttcacaccgcatagggtcatggctgcgccccgacacccgccaacacccgctgacgcgccctgacgggcttgtctgctcccggcatccgcttacagacaagctgtgaccgtctccgggagctgcatgtgtcagaggttttcaccgtcatcaccgaaacgcgcgaggcagcaaggagatggcgcccaacagtcccccggccacggggcctgccaccatacccacgccgaaacaagcgctcatgagcccgaagtggcgagcccgatcttccccatcggtgatgtcggcgatataggcgccagcaaccgcacctgtggcgccggtgatgccggccacgatgcgtccggcgtagaggatctgctcatgtttgacagcttatc

SEQ ID NO: 5650 - DNA, 6337 bp, Artificial Sequence
  Description of Artificial Sequence: Synthetic polynucleotide
ctcgagttagatatccattggtcacattcaaagtgttttttttgcggattatagtccgtggcaatgtttgcatcaagcgtagatagtttttcattttgtgattcgatttaaatgagggggaccatgattacggattcactggccgtcgttttacaacgtcgtgactgggaaaaccctggcgttacccaacttaatcgccttgcagcacatccccctttcgccagctggcgtaatagcgaagaggcccgcaccgatcgcccttcccaacagttgcgcagcctgaatggcgaatggcgctttgcctggtttccggcaccagaagcggtgccggaaagctggctggagtgcgatcttcctgaggccgatactgtcgtcgtcccctcaaactggcagatgcacggttacgatgcgcccatctacaccaacgtgacctatcccattacggtcaatccgccgtttgttcccacggagaatccgacgggttgttactcgctcacatttaatgttgatgaaagctggctacaggaaggccagacgcgaattatttttgatggcgttaactcggcgtttcatctgtggtgcaacgggcgctgggtcggttacggccaggacagtcgtttgccgtctgaatttgacctgagcgcatttttacgcgccggagaaaaccgcctcgcggtgatggtgctgcgctggagtgacggcagttatctggaagatcaggatatgtggcggatgagcggcattttccgtgacgtctcgttgctgcataaaccgactacacaaatcagcgatttccatgttgccactcgctttaatgatgatttcagccgcgctgtactggaggctgaagttcagatgtgcggcgagttgcgtgactacctacgggtaacagtttctttatggcagggtgaaacgcaggtcgccagcggcaccgcgcctttcggcggtgaaattatcgatgagcgtggtggttatgccgatcgcgtcacactacgtctgaacgtcgaaaacccgaaactgtggagcgccgaaatcccgaatctctatcgtgcggtggttgaactgcacaccgccgacggcacgctgattgaagcagaagcctgcgatgtcggtttccgcgaggtgcggattgaaaatggtctgctgctgctgaacggcaagccgttgctgattcgaggcgttaaccgtcacgagcatcatcctctgcatggtcaggtcatggatgagcagacgatggtgcaggatatcctgctgatgaagcagaacaactttaacgccgtgcgctgttcgcattatccgaaccatccgctgtggtacacgctgtgcgaccgctacggcctgtatgtggtggatgaagccaatattgaaacccacggcatggtgccaatgaatcgtctgaccgatgatccgcgctggctaccggcgatgagcgaacgcgtaacgcgaatggtgcagcgcgatcgtaatcacccgagtgtgatcatctggtcgctggggaatgaatcaggccacggcgctaatcacgacgcgctgtatcgctggatcaaatctgtcgatccttcccgcccggtgcagtatgaaggcggcggagccgacaccacggccaccgatattatttgcccgatgtacgcgcgcgtggatgaagaccagcccttcccggctgtgccgaaatggtccatcaaaaaatggctttcgctacctggagagacgcgcccgctgatcctttgcgaatacgcccacgcgatgggtaacagtcttggcggtttcgctaaatactggcaggcgtttcgtcagtatccccgtttacagggcggcttcgtctgggactgggtggatcagtcgctgattaaatatgatgaaaacggcaacccgtggtcggcttacggcggtgattttggcgatacgccgaacgatcgccagttctgtatgaacggtctggtctttgccgaccgcacgccgcatccagcgctgacggaagcaaaacaccagcagcagtttttccagttccgtttatccgggcaaaccatcgaagtgaccagcgaatacctgttccgtcatagcgataacgagctcctgcactggatggtggcgctggatggtaagccgctggcaagcggtgaagtgcctctggatgtcgctccacaaggtaaacagttgattgaactgcctgaactaccgcagccggagagcgccgggcaactctggctcacagtacgcgtagtgcaaccgaacgcgaccgcatggtcagaagccgggcacatcagcgcctggcagcagtggcgtctggcggaaaacctcagtgtgacgctccccgccgcgtcccacgccatcccgcatctgaccaccagcgaaatggatttttgcatcgagctgggtaataagcgttggcaatttaaccgccagtcaggctttctttcacagatgtggattggcgataaaaaacaactgctgacgccgctgcgcgatcagttcacccgtgcaccgctggataacgacattggcgtaagtgaagcgacccgcattgaccctaacgcctgggtcgaacgctggaaggcggcgggccattaccaggccgaagcagcgttgttgcagtgcacggcagatacacttgctgatgcggtgctgattacgaccgctcacgcgtggcagcatcaggggaaaaccttatttatcagccggaaaacctaccggattgatggtagtggtcaaatggcgattaccgttgatgttgaagtggcgagcgatacaccgcatccggcgcggattggcctgaactgccagctggcgcaggtagcagagcgggtaaactggctcggattagggccgcaagaaaactatcccgaccgccttactgccgcctgttttgaccgctgggatctgccattgtcagacatgtataccccgtacgtcttcccgagcgaaaacggtctgcgctgcgggacgcgcgaattgaattatggcccacaccagtggcgcggcgacttccagttcaacatcagccgctacagtcaacagcaactgatggaaaccagccatcgccatctgctgcacgcggaagaaggcacatggctgaatatcgacggtttccatatggggattggtggcgacgactcctggagcccgtcagtatcggcggaattccagctgagcgccggtcgctaccattaccagttggtctggtgtcaaaaataagcctgatacagattaaatcagaacgcagaagcggtctgataaaacagaatttgcctggcggcagtagcgcggtggtcccacctgaccccatgccgaactcagaagtgaaacgccgtagcgccgatggtagtgtggggtctccccatgcgagagtagggaactgccaggcatcaaataaaacgaaaggctcagtcgaaagactgggcctttcgttttatctgttgtttgtcggtgaacgctctcctgagtaggacaaatccgccgggagcggatttgaacgttgcgaagcaacggcccggagggtggcgggcaggacgcccgccataaactgccaggcatcaaattaagcagaaggccatcctgacggatggcctttttgcgtttctacaaactcttttgtttatttttctaaatacattcaaatatgtatccgctcatgagacaataaccctgataaatgcttcaataatattgaaaaaggaagagtatgagtattcaacatttccgtgtcgcccttattcccttttttgcggcattttgccttcctgtttttgctcacccagaaacgctggtgaaagtaaaagatgctgaagatcagttgggtgcacgagtgggttacatcgaactggatctcaacagcggtaagatccttgagagttttcgccccgaagaacgttttccaatgatgagcacttttaaagttctgctatgtggcgcggtattatcccgtgttgacgccgggcaagagcaactcggtcgccgcatacactattctcagaatgacttggttgagtactcaccagtcacagaaaagcatcttacggatggcatgacagtaagagaattatgcagtgctgccataaccatgagtgataacactgcggccaacttacttctgacaacgatcggaggaccgaaggagctaaccgcttttttgcacaacatgggggatcatgtaactcgccttgatcgttgggaaccggagctgaatgaagccataccaaacgacgagcgtgacaccacgatgcctgtagcaatggcaacaacgttgcgcaaactattaactggcgaactacttactctagcttcccggcaacaattaatagactggatggaggcggataaagttgcaggaccacttctgcgctcggcccttccggctggctggtttattgctgataaatctggagccggtgagcgtgggtctcgcggtatcattgcagcactggggccagatggtaagccctcccgtatcgtagttatctacacgacggggagtcaggcaactatggatgaacgaaatagacagatcgctgagataggtgcctcactgattaagcattggtaactgtcagaccaagtttactcatatatactttagattgatttacgcgccctgtagcggcgcattaagcgcggcgggtgtggtggttacgcgcagcgtgaccgctacacttgccagcgccctagcgcccgctcctttcgctttcttcccttcctttctcgccacgttcgccggctttccccgtcaagctctaaatcgggggctccctttagggttccgatttagtgctttacggcacctcgaccccaaaaaacttgatttgggtgatggttcacgtagtgggccatcgccctgatagacggtttttcgccctttgacgttggagtccacgttctttaatagtggactcttgttccaaacttgaacaacactcaaccctatctcgggctattcttttgatttataagggattttgccgatttcggcctattggttaaaaaatgagctgatttaacaaaaatttaacgcgaattttaacaaaatattaacgtttacaatttaaaaggatctaggtgaagatcctttttgataatctcatgaccaaaatcccttaacgtgagttttcgttccactgagcgtcagaccccgtagaaaagatcaaaggatcttcttgagatcctttttttctgcgcgtaatctgctgcttgcaaacaaaaaaaccaccgctaccagcggtggtttgtttgccggatcaagagctaccaactctttttccgaaggtaactggcttcagcagagcgcagataccaaatactgtccttctagtgtagccgtagttaggccaccacttcaagaactctgtagcaccgcctacatacctcgctctgctaatcctgttaccagtggctgctgccagtggcgataagtcgtgtcttaccgggttggactcaagacgatagttaccggataaggcgcagcggtcgggctgaacggggggttcgtgcacacagcccagcttggagcgaacgacctacaccgaactgagatacctacagcgtgagctatgagaaagcgccacgcttcccgaagggagaaaggcggacaggtatccggtaagcggcagggtcggaacaggagagcgcacgagggagcttccagggggaaacgcctggtatctttatagtcctgtcgggtttcgccacctctgacttgagcgtcgatttttgtgatgctcgtcaggggggcggagcctatggaaaaacgccagcaacgcggcctttttacggttcctggccttttgctggccttttgctcacatgttctttcctgcgttatcccctgattctgtggataaccgtattaccgcctttgagtgagctgataccgctcgccgcagccgaacgaccgagcgcagcgagtcagtgagcgaggaagcggaagagcgcctgatgcggtattttctccttacgcatctgtgcggtatttcacaccgcatagggtcatggctgcgccccgacacccgccaacacccgctgacgcgccctgacgggcttgtctgctcccggcatccgcttacagacaagctgtgaccgtctccgggagctgcatgtgtcagaggttttcaccgtcatcaccgaaacgcgcgaggcagcaaggagatggcgcccaacagtcccccggccacggggcctgccaccatacccacgccgaaacaagcgctcatgagcccgaagtggcgagcccgatcttccccatcggtgatgtcggcgatataggcgccagcaaccgcacctgtggcgccggtgatgccggccacgatgcgtccggcgtagaggatctgctcatgtttgacagcttatc

SEQ ID NO: 5651 - DNA, 6367 bp, Artificial Sequence
  Description of Artificial Sequence: Synthetic polynucleotide
ctcgagggttcgccaatgctgaagcacacatcaacaccgttactttccaaacagccactcggctgtttgtttcacccctaagtgaggattataatcctcattactactgcaaagtagctgataaccacacaggaaacagctatgagggggaccatgattacggattcactggccgtcgttttacaacgtcgtgactgggaaaaccctggcgttacccaacttaatcgccttgcagcacatccccctttcgccagctggcgtaatagcgaagaggcccgcaccgatcgcccttcccaacagttgcgcagcctgaatggcgaatggcgctttgcctggtttccggcaccagaagcggtgccggaaagctggctggagtgcgatcttcctgaggccgatactgtcgtcgtcccctcaaactggcagatgcacggttacgatgcgcccatctacaccaacgtgacctatcccattacggtcaatccgccgtttgttcccacggagaatccgacgggttgttactcgctcacatttaatgttgatgaaagctggctacaggaaggccagacgcgaattatttttgatggcgttaactcggcgtttcatctgtggtgcaacgggcgctgggtcggttacggccaggacagtcgtttgccgtctgaatttgacctgagcgcatttttacgcgccggagaaaaccgcctcgcggtgatggtgctgcgctggagtgacggcagttatctggaagatcaggatatgtggcggatgagcggcattttccgtgacgtctcgttgctgcataaaccgactacacaaatcagcgatttccatgttgccactcgctttaatgatgatttcagccgcgctgtactggaggctgaagttcagatgtgcggcgagttgcgtgactacctacgggtaacagtttctttatggcagggtgaaacgcaggtcgccagcggcaccgcgcctttcggcggtgaaattatcgatgagcgtggtggttatgccgatcgcgtcacactacgtctgaacgtcgaaaacccgaaactgtggagcgccgaaatcccgaatctctatcgtgcggtggttgaactgcacaccgccgacggcacgctgattgaagcagaagcctgcgatgtcggtttccgcgaggtgcggattgaaaatggtctgctgctgctgaacggcaagccgttgctgattcgaggcgttaaccgtcacgagcatcatcctctgcatggtcaggtcatggatgagcagacgatggtgcaggatatcctgctgatgaagcagaacaactttaacgccgtgcgctgttcgcattatccgaaccatccgctgtggtacacgctgtgcgaccgctacggcctgtatgtggtggatgaagccaatattgaaacccacggcatggtgccaatgaatcgtctgaccgatgatccgcgctggctaccggcgatgagcgaacgcgtaacgcgaatggtgcagcgcgatcgtaatcacccgagtgtgatcatctggtcgctggggaatgaatcaggccacggcgctaatcacgacgcgctgtatcgctggatcaaatctgtcgatccttcccgcccggtgcagtatgaaggcggcggagccgacaccacggccaccgatattatttgcccgatgtacgcgcgcgtggatgaagaccagcccttcccggctgtgccgaaatggtccatcaaaaaatggctttcgctacctggagagacgcgcccgctgatcctttgcgaatacgcccacgcgatgggtaacagtcttggcggtttcgctaaatactggcaggcgtttcgtcagtatccccgtttacagggcggcttcgtctgggactgggtggatcagtcgctgattaaatatgatgaaaacggcaacccgtggtcggcttacggcggtgattttggcgatacgccgaacgatcgccagttctgtatgaacggtctggtctttgccgaccgcacgccgcatccagcgctgacggaagcaaaacaccagcagcagtttttccagttccgtttatccgggcaaaccatcgaagtgaccagcgaatacctgttccgtcatagcgataacgagctcctgcactggatggtggcgctggatggtaagccgctggcaagcggtgaagtgcctctggatgtcgctccacaaggtaaacagttgattgaactgcctgaactaccgcagccggagagcgccgggcaactctggctcacagtacgcgtagtgcaaccgaacgcgaccgcatggtcagaagccgggcacatcagcgcctggcagcagtggcgtctggcggaaaacctcagtgtgacgctccccgccgcgtcccacgccatcccgcatctgaccaccagcgaaatggatttttgcatcgagctgggtaataagcgttggcaatttaaccgccagtcaggctttctttcacagatgtggattggcgataaaaaacaactgctgacgccgctgcgcgatcagttcacccgtgcaccgctggataacgacattggcgtaagtgaagcgacccgcattgaccctaacgcctgggtcgaacgctggaaggcggcgggccattaccaggccgaagcagcgttgttgcagtgcacggcagatacacttgctgatgcggtgctgattacgaccgctcacgcgtggcagcatcaggggaaaaccttatttatcagccggaaaacctaccggattgatggtagtggtcaaatggcgattaccgttgatgttgaagtggcgagcgatacaccgcatccggcgcggattggcctgaactgccagctggcgcaggtagcagagcgggtaaactggctcggattagggccgcaagaaaactatcccgaccgccttactgccgcctgttttgaccgctgggatctgccattgtcagacatgtataccccgtacgtcttcccgagcgaaaacggtctgcgctgcgggacgcgcgaattgaattatggcccacaccagtggcgcggcgacttccagttcaacatcagccgctacagtcaacagcaactgatggaaaccagccatcgccatctgctgcacgcggaagaaggcacatggctgaatatcgacggtttccatatggggattggtggcgacgactcctggagcccgtcagtatcggcggaattccagctgagcgccggtcgctaccattaccagttggtctggtgtcaaaaataagcctgatacagattaaatcagaacgcagaagcggtctgataaaacagaatttgcctggcggcagtagcgcggtggtcccacctgaccccatgccgaactcagaagtgaaacgccgtagcgccgatggtagtgtggggtctccccatgcgagagtagggaactgccaggcatcaaataaaacgaaaggctcagtcgaaagactgggcctttcgttttatctgttgtttgtcggtgaacgctctcctgagtaggacaaatccgccgggagcggatttgaacgttgcgaagcaacggcccggagggtggcgggcaggacgcccgccataaactgccaggcatcaaattaagcagaaggccatcctgacggatggcctttttgcgtttctacaaactcttttgtttatttttctaaatacattcaaatatgtatccgctcatgagacaataaccctgataaatgcttcaataatattgaaaaaggaagagtatgagtattcaacatttccgtgtcgcccttattcccttttttgcggcattttgccttcctgtttttgctcacccagaaacgctggtgaaagtaaaagatgctgaagatcagttgggtgcacgagtgggttacatcgaactggatctcaacagcggtaagatccttgagagttttcgccccgaagaacgttttccaatgatgagcacttttaaagttctgctatgtggcgcggtattatcccgtgttgacgccgggcaagagcaactcggtcgccgcatacactattctcagaatgacttggttgagtactcaccagtcacagaaaagcatcttacggatggcatgacagtaagagaattatgcagtgctgccataaccatgagtgataacactgcggccaacttacttctgacaacgatcggaggaccgaaggagctaaccgcttttttgcacaacatgggggatcatgtaactcgccttgatcgttgggaaccggagctgaatgaagccataccaaacgacgagcgtgacaccacgatgcctgtagcaatggcaacaacgttgcgcaaactattaactggcgaactacttactctagcttcccggcaacaattaatagactggatggaggcggataaagttgcaggaccacttctgcgctcggcccttccggctggctggtttattgctgataaatctggagccggtgagcgtgggtctcgcggtatcattgcagcactggggccagatggtaagccctcccgtatcgtagttatctacacgacggggagtcaggcaactatggatgaacgaaatagacagatcgctgagataggtgcctcactgattaagcattggtaactgtcagaccaagtttactcatatatactttagattgatttacgcgccctgtagcggcgcattaagcgcggcgggtgtggtggttacgcgcagcgtgaccgctacacttgccagcgccctagcgcccgctcctttcgctttcttcccttcctttctcgccacgttcgccggctttccccgtcaagctctaaatcgggggctccctttagggttccgatttagtgctttacggcacctcgaccccaaaaaacttgatttgggtgatggttcacgtagtgggccatcgccctgatagacggtttttcgccctttgacgttggagtccacgttctttaatagtggactcttgttccaaacttgaacaacactcaaccctatctcgggctattcttttgatttataagggattttgccgatttcggcctattggttaaaaaatgagctgatttaacaaaaatttaacgcgaattttaacaaaatattaacgtttacaatttaaaaggatctaggtgaagatcctttttgataatctcatgaccaaaatcccttaacgtgagttttcgttccactgagcgtcagaccccgtagaaaagatcaaaggatcttcttgagatcctttttttctgcgcgtaatctgctgcttgcaaacaaaaaaaccaccgctaccagcggtggtttgtttgccggatcaagagctaccaactctttttccgaaggtaactggcttcagcagagcgcagataccaaatactgtccttctagtgtagccgtagttaggccaccacttcaagaactctgtagcaccgcctacatacctcgctctgctaatcctgttaccagtggctgctgccagtggcgataagtcgtgtcttaccgggttggactcaagacgatagttaccggataaggcgcagcggtcgggctgaacggggggttcgtgcacacagcccagcttggagcgaacgacctacaccgaactgagatacctacagcgtgagctatgagaaagcgccacgcttcccgaagggagaaaggcggacaggtatccggtaagcggcagggtcggaacaggagagcgcacgagggagcttccagggggaaacgcctggtatctttatagtcctgtcgggtttcgccacctctgacttgagcgtcgatttttgtgatgctcgtcaggggggcggagcctatggaaaaacgccagcaacgcggcctttttacggttcctggccttttgctggccttttgctcacatgttctttcctgcgttatcccctgattctgtggataaccgtattaccgcctttgagtgagctgataccgctcgccgcagccgaacgaccgagcgcagcgagtcagtgagcgaggaagcggaagagcgcctgatgcggtattttctccttacgcatctgtgcggtatttcacaccgcatagggtcatggctgcgccccgacacccgccaacacccgctgacgcgccctgacgggcttgtctgctcccggcatccgcttacagacaagctgtgaccgtctccgggagctgcatgtgtcagaggttttcaccgtcatcaccgaaacgcgcgaggcagcaaggagatggcgcccaacagtcccccggccacggggcctgccaccatacccacgccgaaacaagcgctcatgagcccgaagtggcgagcccgatcttccccatcggtgatgtcggcgatataggcgccagcaaccgcacctgtggcgccggtgatgccggccacgatgcgtccggcgtagaggatctgctcatgtttgacagcttatc

SEQ ID NO: 5652 - DNA, 5493 bp, Artificial Sequence
  Description of Artificial Sequence: Synthetic polynucleotide
tggcgaatgggacgcgccctgtagcggcgcattaagcgcggcgggtgtggtggttacgcgcagcgtgaccgctacacttgccagcgccctagcgcccgctcctttcgctttcttcccttcctttctcgccacgttcgccggctttccccgtcaagctctaaatcgggggctccctttagggttccgatttagtgctttacggcacctcgaccccaaaaaacttgattagggtgatggttcacgtagtgggccatcgccctgatagacggtttttcgccctttgacgttggagtccacgttctttaatagtggactcttgttccaaactggaacaacactcaaccctatctcggtctattcttttgatttataagggattttgccgatttcggcctattggttaaaaaatgagctgatttaacaaaaatttaacgcgaattttaacaaaatattaacgtttacaatttcaggtggcacttttcggggaaatgtgcgcggaacccctatttgtttatttttctaaatacattcaaatatgtatccgctcatgagacaataaccctgataaatgcttcaataatattgaaaaaggaagagtatgagtattcaacatttccgtgtcgcccttattcccttttttgcggcattttgccttcctgtttttgctcacccagaaacgctggtgaaagtaaaagatgctgaagatcagttgggtgcacgagtgggttacatcgaactggatctcaacagcggtaagatccttgagagttttcgccccgaagaacgttttccaatgatgagcacttttaaagttctgctatgtggcgcggtattatcccgtattgacgccgggcaagagcaactcggtcgccgcatacactattctcagaatgacttggttgagtactcaccagtcacagaaaagcatcttacggatggcatgacagtaagagaattatgcagtgctgccataaccatgagtgataacactgcggccaacttacttctgacaacgatcggaggaccgaaggagctaaccgcttttttgcacaacatgggggatcatgtaactcgccttgatcgttgggaaccggagctgaatgaagccataccaaacgacgagcgtgacaccacgatgcctgcagcaatggcaacaacgttgcgcaaactattaactggcgaactacttactctagcttcccggcaacaattaatagactggatggaggcggataaagttgcaggaccacttctgcgctcggcccttccggctggctggtttattgctgataaatctggagccggtgagcgtgggtctcgcggtatcattgcagcactggggccagatggtaagccctcccgtatcgtagttatctacacgacggggagtcaggcaactatggatgaacgaaatagacagatcgctgagataggtgcctcactgattaagcattggtaactgtcagaccaagtttactcatatatactttagattgatttaaaacttcatttttaatttaaaaggatctaggtgaagatcctttttgataatctcatgaccaaaatcccttaacgtgagttttcgttccactgagcgtcagaccccgtagaaaagatcaaaggatcttcttgagatcctttttttctgcgcgtaatctgctgcttgcaaacaaaaaaaccaccgctaccagcggtggtttgtttgccggatcaagagctaccaactctttttccgaaggtaactggcttcagcagagcgcagataccaaatactgtccttctagtgtagccgtagttaggccaccacttcaagaactctgtagcaccgcctacatacctcgctctgctaatcctgttaccagtggctgctgccagtggcgataagtcgtgtcttaccgggttggactcaagacgatagttaccggataaggcgcagcggtcgggctgaacggggggttcgtgcacacagcccagcttggagcgaacgacctacaccgaactgagatacctacagcgtgagctatgagaaagcgccacgcttcccgaagggagaaaggcggacaggtatccggtaagcggcagggtcggaacaggagagcgcacgagggagcttccagggggaaacgcctggtatctttatagtcctgtcgggtttcgccacctctgacttgagcgtcgatttttgtgatgctcgtcaggggggcggagcctatggaaaaacgccagcaacgcggcctttttacggttcctggccttttgctggccttttgctcacatgttctttcctgcgttatcccctgattctgtggataaccgtattaccgcctttgagtgagctgataccgctcgccgcagccgaacgaccgagcgcagcgagtcagtgagcgaggaagcggaagagcgcctgatgcggtattttctccttacgcatctgtgcggtatttcacaccgcatatatggtgcactctcagtacaatctgctctgatgccgcatagttaagccagtatacactccgctatcgctacgtgactgggtcatggctgcgccccgacacccgccaacacccgctgacgcgccctgacgggcttgtctgctcccggcatccgcttacagacaagctgtgaccgtctccgggagctgcatgtgtcagaggttttcaccgtcatcaccgaaacgcgcgaggcagctgcggtaaagctcatcagcgtggtcgtgaagcgattcacagatgtctgcctgttcatccgcgtccagctcgttgagtttctccagaagcgttaatgtctggcttctgataaagcgggccatgttaagggcggttttttcctgtttggtcactgatgcctccgtgtaagggggatttctgttcatgggggtaatgataccgatgaaacgagagaggatgctcacgatacgggttactgatgatgaacatgcccggttactggaacgttgtgagggtaaacaactggcggtatggatgcggcgggaccagagaaaaatcactcagggtcaatgccagcgcttcgttaatacagatgtaggtgttccacagggtagccagcagcatcctgcgatgcagatccggaacataatggtgcagggcgctgacttccgcgtttccagactttacgaaacacggaaaccgaagaccattcatgttgttgctcaggtcgcagacgttttgcagcagcagtcgcttcacgttcgctcgcgtatcggtgattcattctgctaaccagtaaggcaaccccgccagcctagccgggtcctcaacgacaggagcacgatcatgcgcacccgtggggccgccatgccggcgataatggcctgcttctcgccgaaacgtttggtggcgggaccagtgacgaaggcttgagcgagggcgtgcaagattccgaataccgcaagcgacaggccgatcatcgtcgcgctccagcgaaagcggtcctcgccgaaaatgacccagagcgctgccggcacctgtcctacgagttgcatgataaagaagacagtcataagtgcggcgacgatagtcatgccccgcgcccaccggaaggagctgactgggttgaaggctctcaagggcatcggtcgagatcccggtgcctaatgagtgagctaacttacattaattgcgttgcgctcactgcccgctttccagtcgggaaacctgtcgtgccagctgcattaatgaatcggccaacgcgcggggagaggcggtttgcgtattgggcgccagggtggtttttcttttcaccagtgagacgggcaacagctgattgcccttcaccgcctggccctgagagagttgcagcaagcggtccacgctggtttgccccagcaggcgaaaatcctgtttgatggtggttaacggcgggatataacatgagctgtcttcggtatcgtcgtatcccactaccgagatatccgcaccaacgcgcagcccggactcggtaatggcgcgcattgcgcccagcgccatctgatcgttggcaaccagcatcgcagtgggaacgatgccctcattcagcatttgcatggtttgttgaaaaccggacatggcactccagtcgccttcccgttccgctatcggctgaatttgattgcgagtgagatatttatgccagccagccagacgcagacgcgccgagacagaacttaatgggcccgctaacagcgcgatttgctggtgacccaatgcgaccagatgctccacgcccagtcgcgtaccgtcttcatgggagaaaataatactgttgatgggtgtctggtcagagacatcaagaaataacgccggaacattagtgcaggcagcttccacagcaatggcatcctggtcatccagcggatagttaatgatcagcccactgacgcgttgcgcgagaagattgtgcaccgccgctttacaggcttcgacgccgcttcgttctaccatcgacaccaccacgctggcacccagttgatcggcgcgagatttaatcgccgcgacaatttgcgacggcgcgtgcagggccagactggaggtggcaacgccaatcagcaacgactgtttgcccgccagttgttgtgccacgcggttgggaatgtaattcagctccgccatcgccgcttccactttttcccgcgttttcgcagaaacgtggctggcctggttcaccacgcgggaaacggtctgataagagacaccggcatactctgcgacatcgtataacgttactggtttcacattcaccaccctgaattgactctcttccgggcgctatcatgccataccgcgaaaggttttgcgccattcgatggtgtccgggatctcgacgctctcccttatgcgactcctgcattaggaagcagcccagtagtaggttgaggccgttgagcaccgccgccgcaaggaatggtgcatgcaaggagatggcgcccaacagtcccccggccacggggcctgccaccatacccacgccgaaacaagcgctcatgagcccgaagtggcgagcccgatcttccccatcggtgatgtcggcgatataggcgccagcaaccgcacctgtggcgccggtgatgccggccacgatgcgtccggcgtagaggatcgagatctcgatcccgcgaaattaatacgactcactataggggaattgtgagcggataacaattcccctctagaaataattttgtttaactttaagaaggagatatacatatgaaatacctgctgccgaccgctgctgctggtctgctgctcctcgctgcccagccggcgatggccatggatatcggaattaattcggatccgaattcgagctccgtcgacaagcttgcggccgcactcgagcaccaccaccaccaccactgagatccggctgctaacaaagcccgaaaggaagctgagttggctgctgccaccgctgagcaataactagcataaccccttggggcctctaaacgggtcttgaggggttttttgctgaaaggaggaactatatccggat

SEQ ID NO: 5653 - DNA, 5694 bp, Artificial Sequence
  Description of Artificial Sequence: Synthetic polynucleotide
tggcgaatgggacgcgccctgtagcggcgcattaagcgcggcgggtgtggtggttacgcgcagcgtgaccgctacacttgccagcgccctagcgcccgctcctttcgctttcttcccttcctttctcgccacgttcgccggctttccccgtcaagctctaaatcgggggctccctttagggttccgatttagtgctttacggcacctcgaccccaaaaaacttgattagggtgatggttcacgtagtgggccatcgccctgatagacggtttttcgccctttgacgttggagtccacgttctttaatagtggactcttgttccaaactggaacaacactcaaccctatctcggtctattcttttgatttataagggattttgccgatttcggcctattggttaaaaaatgagctgatttaacaaaaatttaacgcgaattttaacaaaatattaacgtttacaatttcaggtggcacttttcggggaaatgtgcgcggaacccctatttgtttatttttctaaatacattcaaatatgtatccgctcatgagacaataaccctgataaatgcttcaataatattgaaaaaggaagagtatgagtattcaacatttccgtgtcgcccttattcccttttttgcggcattttgccttcctgtttttgctcacccagaaacgctggtgaaagtaaaagatgctgaagatcagttgggtgcacgagtgggttacatcgaactggatctcaacagcggtaagatccttgagagttttcgccccgaagaacgttttccaatgatgagcacttttaaagttctgctatgtggcgcggtattatcccgtattgacgccgggcaagagcaactcggtcgccgcatacactattctcagaatgacttggttgagtactcaccagtcacagaaaagcatcttacggatggcatgacagtaagagaattatgcagtgctgccataaccatgagtgataacactgcggccaacttacttctgacaacgatcggaggaccgaaggagctaaccgcttttttgcacaacatgggggatcatgtaactcgccttgatcgttgggaaccggagctgaatgaagccataccaaacgacgagcgtgacaccacgatgcctgcagcaatggcaacaacgttgcgcaaactattaactggcgaactacttactctagcttcccggcaacaattaatagactggatggaggcggataaagttgcaggaccacttctgcgctcggcccttccggctggctggtttattgctgataaatctggagccggtgagcgtgggtctcgcggtatcattgcagcactggggccagatggtaagccctcccgtatcgtagttatctacacgacggggagtcaggcaactatggatgaacgaaatagacagatcgctgagataggtgcctcactgattaagcattggtaactgtcagaccaagtttactcatatatactttagattgatttaaaacttcatttttaatttaaaaggatctaggtgaagatcctttttgataatctcatgaccaaaatcccttaacgtgagttttcgttccactgagcgtcagaccccgtagaaaagatcaaaggatcttcttgagatcctttttttctgcgcgtaatctgctgcttgcaaacaaaaaaaccaccgctaccagcggtggtttgtttgccggatcaagagctaccaactctttttccgaaggtaactggcttcagcagagcgcagataccaaatactgtccttctagtgtagccgtagttaggccaccacttcaagaactctgtagcaccgcctacatacctcgctctgctaatcctgttaccagtggctgctgccagtggcgataagtcgtgtcttaccgggttggactcaagacgatagttaccggataaggcgcagcggtcgggctgaacggggggttcgtgcacacagcccagcttggagcgaacgacctacaccgaactgagatacctacagcgtgagctatgagaaagcgccacgcttcccgaagggagaaaggcggacaggtatccggtaagcggcagggtcggaacaggagagcgcacgagggagcttccagggggaaacgcctggtatctttatagtcctgtcgggtttcgccacctctgacttgagcgtcgatttttgtgatgctcgtcaggggggcggagcctatggaaaaacgccagcaacgcggcctttttacggttcctggccttttgctggccttttgctcacatgttctttcctgcgttatcccctgattctgtggataaccgtattaccgcctttgagtgagctgataccgctcgccgcagccgaacgaccgagcgcagcgagtcagtgagcgaggaagcggaagagcgcctgatgcggtattttctccttacgcatctgtgcggtatttcacaccgcatatatggtgcactctcagtacaatctgctctgatgccgcatagttaagccagtatacactccgctatcgctacgtgactgggtcatggctgcgccccgacacccgccaacacccgctgacgcgccctgacgggcttgtctgctcccggcatccgcttacagacaagctgtgaccgtctccgggagctgcatgtgtcagaggttttcaccgtcatcaccgaaacgcgcgaggcagctgcggtaaagctcatcagcgtggtcgtgaagcgattcacagatgtctgcctgttcatccgcgtccagctcgttgagtttctccagaagcgttaatgtctggcttctgataaagcgggccatgttaagggcggttttttcctgtttggtcactgatgcctccgtgtaagggggatttctgttcatgggggtaatgataccgatgaaacgagagaggatgctcacgatacgggttactgatgatgaacatgcccggttactggaacgttgtgagggtaaacaactggcggtatggatgcggcgggaccagagaaaaatcactcagggtcaatgccagcgcttcgttaatacagatgtaggtgttccacagggtagccagcagcatcctgcgatgcagatccggaacataatggtgcagggcgctgacttccgcgtttccagactttacgaaacacggaaaccgaagaccattcatgttgttgctcaggtcgcagacgttttgcagcagcagtcgcttcacgttcgctcgcgtatcggtgattcattctgctaaccagtaaggcaaccccgccagcctagccgggtcctcaacgacaggagcacgatcatgcgcacccgtggggccgccatgccggcgataatggcctgcttctcgccgaaacgtttggtggcgggaccagtgacgaaggcttgagcgagggcgtgcaagattccgaataccgcaagcgacaggccgatcatcgtcgcgctccagcgaaagcggtcctcgccgaaaatgacccagagcgctgccggcacctgtcctacgagttgcatgataaagaagacagtcataagtgcggcgacgatagtcatgccccgcgcccaccggaaggagctgactgggttgaaggctctcaagggcatcggtcgagatcccggtgcctaatgagtgagctaacttacattaattgcgttgcgctcactgcccgctttccagtcgggaaacctgtcgtgccagctgcattaatgaatcggccaacgcgcggggagaggcggtttgcgtattgggcgccagggtggtttttcttttcaccagtgagacgggcaacagctgattgcccttcaccgcctggccctgagagagttgcagcaagcggtccacgctggtttgccccagcaggcgaaaatcctgtttgatggtggttaacggcgggatataacatgagctgtcttcggtatcgtcgtatcccactaccgagatatccgcaccaacgcgcagcccggactcggtaatggcgcgcattgcgcccagcgccatctgatcgttggcaaccagcatcgcagtgggaacgatgccctcattcagcatttgcatggtttgttgaaaaccggacatggcactccagtcgccttcccgttccgctatcggctgaatttgattgcgagtgagatatttatgccagccagccagacgcagacgcgccgagacagaacttaatgggcccgctaacagcgcgatttgctggtgacccaatgcgaccagatgctccacgcccagtcgcgtaccgtcttcatgggagaaaataatactgttgatgggtgtctggtcagagacatcaagaaataacgccggaacattagtgcaggcagcttccacagcaatggcatcctggtcatccagcggatagttaatgatcagcccactgacgcgttgcgcgagaagattgtgcaccgccgctttacaggcttcgacgccgcttcgttctaccatcgacaccaccacgctggcacccagttgatcggcgcgagatttaatcgccgcgacaatttgcgacggcgcgtgcagggccagactggaggtggcaacgccaatcagcaacgactgtttgcccgccagttgttgtgccacgcggttgggaatgtaattcagctccgccatcgccgcttccactttttcccgcgttttcgcagaaacgtggctggcctggttcaccacgcgggaaacggtctgataagagacaccggcatactctgcgacatcgtataacgttactggtttcacattcaccaccctgaattgactctcttccgggcgctatcatgccataccgcgaaaggttttgcgccattcgatggtgtccgggatctcgacgctctcccttatgcgactcctgcattaggaagcagcccagtagtaggttgaggccgttgagcaccgccgccgcaaggaatggtgcatgcaaggagatggcgcccaacagtcccccggccacggggcctgccaccatacccacgccgaaacaagcgctcatgagcccgaagtggcgagcccgatcttccccatcggtgatgtcggcgatataggcgccagcaaccgcacctgtggcgccggtgatgccggccacgatgcgtccggcgtagaggatcgagatctcgatcccgcgaaattaatacgactcactataggggaattgtgagcggataacaattcccctctagaaataattttgtttaactttaagaaggagatatacatatgactaatccattacccattcgccttaaagccgctcgcaaggctactggactgactcaacaacagttaggtatccgcttgggaatggaacaatcaaccgcatctgcccgcatgaaccagtacgagaaagggaaacatgcgcctgactatcaaaccatgcaacgcatcgcccaggagctgggctatcccgttgcgtacttctattgtgatgacgagcttctggcggaactgatctgcatgatggccaaactttccgaggagaaacagcgcgaattgcttcaacagttgagtgtaactgaatatgcagagtcgcgtgactcggcagagctcgagcaccaccaccaccaccactgagatccggctgctaacaaagcccgaaaggaagctgagttggctgctgccaccgctgagcaataactagcataaccccttggggcctctaaacgggtcttgaggggttttttgctgaaaggaggaactatatccggat

SEQ ID NO: 5654 - DNA, 5667 bp, Artificial Sequence
  Description of Artificial Sequence: Synthetic polynucleotide
tggcgaatgggacgcgccctgtagcggcgcattaagcgcggcgggtgtggtggttacgcgcagcgtgaccgctacacttgccagcgccctagcgcccgctcctttcgctttcttcccttcctttctcgccacgttcgccggctttccccgtcaagctctaaatcgggggctccctttagggttccgatttagtgctttacggcacctcgaccccaaaaaacttgattagggtgatggttcacgtagtgggccatcgccctgatagacggtttttcgccctttgacgttggagtccacgttctttaatagtggactcttgttccaaactggaacaacactcaaccctatctcggtctattcttttgatttataagggattttgccgatttcggcctattggttaaaaaatgagctgatttaacaaaaatttaacgcgaattttaacaaaatattaacgtttacaatttcaggtggcacttttcggggaaatgtgcgcggaacccctatttgtttatttttctaaatacattcaaatatgtatccgctcatgagacaataaccctgataaatgcttcaataatattgaaaaaggaagagtatgagtattcaacatttccgtgtcgcccttattcccttttttgcggcattttgccttcctgtttttgctcacccagaaacgctggtgaaagtaaaagatgctgaagatcagttgggtgcacgagtgggttacatcgaactggatctcaacagcggtaagatccttgagagttttcgccccgaagaacgttttccaatgatgagcacttttaaagttctgctatgtggcgcggtattatcccgtattgacgccgggcaagagcaactcggtcgccgcatacactattctcagaatgacttggttgagtactcaccagtcacagaaaagcatcttacggatggcatgacagtaagagaattatgcagtgctgccataaccatgagtgataacactgcggccaacttacttctgacaacgatcggaggaccgaaggagctaaccgcttttttgcacaacatgggggatcatgtaactcgccttgatcgttgggaaccggagctgaatgaagccataccaaacgacgagcgtgacaccacgatgcctgcagcaatggcaacaacgttgcgcaaactattaactggcgaactacttactctagcttcccggcaacaattaatagactggatggaggcggataaagttgcaggaccacttctgcgctcggcccttccggctggctggtttattgctgataaatctggagccggtgagcgtgggtctcgcggtatcattgcagcactggggccagatggtaagccctcccgtatcgtagttatctacacgacggggagtcaggcaactatggatgaacgaaatagacagatcgctgagataggtgcctcactgattaagcattggtaactgtcagaccaagtttactcatatatactttagattgatttaaaacttcatttttaatttaaaaggatctaggtgaagatcctttttgataatctcatgaccaaaatcccttaacgtgagttttcgttccactgagcgtcagaccccgtagaaaagatcaaaggatcttcttgagatcctttttttctgcgcgtaatctgctgcttgcaaacaaaaaaaccaccgctaccagcggtggtttgtttgccggatcaagagctaccaactctttttccgaaggtaactggcttcagcagagcgcagataccaaatactgtccttctagtgtagccgtagttaggccaccacttcaagaactctgtagcaccgcctacatacctcgctctgctaatcctgttaccagtggctgctgccagtggcgataagtcgtgtcttaccgggttggactcaagacgatagttaccggataaggcgcagcggtcgggctgaacggggggttcgtgcacacagcccagcttggagcgaacgacctacaccgaactgagatacctacagcgtgagctatgagaaagcgccacgcttcccgaagggagaaaggcggacaggtatccggtaagcggcagggtcggaacaggagagcgcacgagggagcttccagggggaaacgcctggtatctttatagtcctgtcgggtttcgccacctctgacttgagcgtcgatttttgtgatgctcgtcaggggggcggagcctatggaaaaacgccagcaacgcggcctttttacggttcctggccttttgctggccttttgctcacatgttctttcctgcgttatcccctgattctgtggataaccgtattaccgcctttgagtgagctgataccgctcgccgcagccgaacgaccgagcgcagcgagtcagtgagcgaggaagcggaagagcgcctgatgcggtattttctccttacgcatctgtgcggtatttcacaccgcatatatggtgcactctcagtacaatctgctctgatgccgcatagttaagccagtatacactccgctatcgctacgtgactgggtcatggctgcgccccgacacccgccaacacccgctgacgcgccctgacgggcttgtctgctcccggcatccgcttacagacaagctgtgaccgtctccgggagctgcatgtgtcagaggttttcaccgtcatcaccgaaacgcgcgaggcagctgcggtaaagctcatcagcgtggtcgtgaagcgattcacagatgtctgcctgttcatccgcgtccagctcgttgagtttctccagaagcgttaatgtctggcttctgataaagcgggccatgttaagggcggttttttcctgtttggtcactgatgcctccgtgtaagggggatttctgttcatgggggtaatgataccgatgaaacgagagaggatgctcacgatacgggttactgatgatgaacatgcccggttactggaacgttgtgagggtaaacaactggcggtatggatgcggcgggaccagagaaaaatcactcagggtcaatgccagcgcttcgttaatacagatgtaggtgttccacagggtagccagcagcatcctgcgatgcagatccggaacataatggtgcagggcgctgacttccgcgtttccagactttacgaaacacggaaaccgaagaccattcatgttgttgctcaggtcgcagacgttttgcagcagcagtcgcttcacgttcgctcgcgtatcggtgattcattctgctaaccagtaaggcaaccccgccagcctagccgggtcctcaacgacaggagcacgatcatgcgcacccgtggggccgccatgccggcgataatggcctgcttctcgccgaaacgtttggtggcgggaccagtgacgaaggcttgagcgagggcgtgcaagattccgaataccgcaagcgacaggccgatcatcgtcgcgctccagcgaaagcggtcctcgccgaaaatgacccagagcgctgccggcacctgtcctacgagttgcatgataaagaagacagtcataagtgcggcgacgatagtcatgccccgcgcccaccggaaggagctgactgggttgaaggctctcaagggcatcggtcgagatcccggtgcctaatgagtgagctaacttacattaattgcgttgcgctcactgcccgctttccagtcgggaaacctgtcgtgccagctgcattaatgaatcggccaacgcgcggggagaggcggtttgcgtattgggcgccagggtggtttttcttttcaccagtgagacgggcaacagctgattgcccttcaccgcctggccctgagagagttgcagcaagcggtccacgctggtttgccccagcaggcgaaaatcctgtttgatggtggttaacggcgggatataacatgagctgtcttcggtatcgtcgtatcccactaccgagatatccgcaccaacgcgcagcccggactcggtaatggcgcgcattgcgcccagcgccatctgatcgttggcaaccagcatcgcagtgggaacgatgccctcattcagcatttgcatggtttgttgaaaaccggacatggcactccagtcgccttcccgttccgctatcggctgaatttgattgcgagtgagatatttatgccagccagccagacgcagacgcgccgagacagaacttaatgggcccgctaacagcgcgatttgctggtgacccaatgcgaccagatgctccacgcccagtcgcgtaccgtcttcatgggagaaaataatactgttgatgggtgtctggtcagagacatcaagaaataacgccggaacattagtgcaggcagcttccacagcaatggcatcctggtcatccagcggatagttaatgatcagcccactgacgcgttgcgcgagaagattgtgcaccgccgctttacaggcttcgacgccgcttcgttctaccatcgacaccaccacgctggcacccagttgatcggcgcgagatttaatcgccgcgacaatttgcgacggcgcgtgcagggccagactggaggtggcaacgccaatcagcaacgactgtttgcccgccagttgttgtgccacgcggttgggaatgtaattcagctccgccatcgccgcttccactttttcccgcgttttcgcagaaacgtggctggcctggttcaccacgcgggaaacggtctgataagagacaccggcatactctgcgacatcgtataacgttactggtttcacattcaccaccctgaattgactctcttccgggcgctatcatgccataccgcgaaaggttttgcgccattcgatggtgtccgggatctcgacgctctcccttatgcgactcctgcattaggaagcagcccagtagtaggttgaggccgttgagcaccgccgccgcaaggaatggtgcatgcaaggagatggcgcccaacagtcccccggccacggggcctgccaccatacccacgccgaaacaagcgctcatgagcccgaagtggcgagcccgatcttccccatcggtgatgtcggcgatataggcgccagcaaccgcacctgtggcgccggtgatgccggccacgatgcgtccggcgtagaggatcgagatctcgatcccgcgaaattaatacgactcactataggggaattgtgagcggataacaattcccctctagaaataattttgtttaactttaagaaggagatatacatatgcagaaggataaccccatcccggcgaggctcaaagctgcgcgtaaaaaagccaagatcacccaaaaagatttaggggtgaaaattggtatggaacaaagttctgctagcggtcgtatgaatcattacgagaaaggcaggcatgtacctgatattggtacgcttgagcgcatggctgaagagttagatgtgccgctaaactactttttctgtaggagcgaattgagcgctgagttagcgtgcgcaattgataagatgagtgatgaagagaaggcggtgttgttggaaaagctgagaagtctcgagcaccaccaccaccaccactgagatccggctgctaacaaagcccgaaaggaagctgagttggctgctgccaccgctgagcaataactagcataaccccttggggcctctaaacgggtcttgaggggttttttgctgaaaggaggaactatatccggat

SEQ ID NO: 5655 - DNA, 5571 bp, Artificial Sequence
  Description of Artificial Sequence: Synthetic polynucleotide
tggcgaatgggacgcgccctgtagcggcgcattaagcgcggcgggtgtggtggttacgcgcagcgtgaccgctacacttgccagcgccctagcgcccgctcctttcgctttcttcccttcctttctcgccacgttcgccggctttccccgtcaagctctaaatcgggggctccctttagggttccgatttagtgctttacggcacctcgaccccaaaaaacttgattagggtgatggttcacgtagtgggccatcgccctgatagacggtttttcgccctttgacgttggagtccacgttctttaatagtggactcttgttccaaactggaacaacactcaaccctatctcggtctattcttttgatttataagggattttgccgatttcggcctattggttaaaaaatgagctgatttaacaaaaatttaacgcgaattttaacaaaatattaacgtttacaatttcaggtggcacttttcggggaaatgtgcgcggaacccctatttgtttatttttctaaatacattcaaatatgtatccgctcatgagacaataaccctgataaatgcttcaataatattgaaaaaggaagagtatgagtattcaacatttccgtgtcgcccttattcccttttttgcggcattttgccttcctgtttttgctcacccagaaacgctggtgaaagtaaaagatgctgaagatcagttgggtgcacgagtgggttacatcgaactggatctcaacagcggtaagatccttgagagttttcgccccgaagaacgttttccaatgatgagcacttttaaagttctgctatgtggcgcggtattatcccgtattgacgccgggcaagagcaactcggtcgccgcatacactattctcagaatgacttggttgagtactcaccagtcacagaaaagcatcttacggatggcatgacagtaagagaattatgcagtgctgccataaccatgagtgataacactgcggccaacttacttctgacaacgatcggaggaccgaaggagctaaccgcttttttgcacaacatgggggatcatgtaactcgccttgatcgttgggaaccggagctgaatgaagccataccaaacgacgagcgtgacaccacgatgcctgcagcaatggcaacaacgttgcgcaaactattaactggcgaactacttactctagcttcccggcaacaattaatagactggatggaggcggataaagttgcaggaccacttctgcgctcggcccttccggctggctggtttattgctgataaatctggagccggtgagcgtgggtctcgcggtatcattgcagcactggggccagatggtaagccctcccgtatcgtagttatctacacgacggggagtcaggcaactatggatgaacgaaatagacagatcgctgagataggtgcctcactgattaagcattggtaactgtcagaccaagtttactcatatatactttagattgatttaaaacttcatttttaatttaaaaggatctaggtgaagatcctttttgataatctcatgaccaaaatcccttaacgtgagttttcgttccactgagcgtcagaccccgtagaaaagatcaaaggatcttcttgagatcctttttttctgcgcgtaatctgctgcttgcaaacaaaaaaaccaccgctaccagcggtggtttgtttgccggatcaagagctaccaactctttttccgaaggtaactggcttcagcagagcgcagataccaaatactgtccttctagtgtagccgtagttaggccaccacttcaagaactctgtagcaccgcctacatacctcgctctgctaatcctgttaccagtggctgctgccagtggcgataagtcgtgtcttaccgggttggactcaagacgatagttaccggataaggcgcagcggtcgggctgaacggggggttcgtgcacacagcccagcttggagcgaacgacctacaccgaactgagatacctacagcgtgagctatgagaaagcgccacgcttcccgaagggagaaaggcggacaggtatccggtaagcggcagggtcggaacaggagagcgcacgagggagcttccagggggaaacgcctggtatctttatagtcctgtcgggtttcgccacctctgacttgagcgtcgatttttgtgatgctcgtcaggggggcggagcctatggaaaaacgccagcaacgcggcctttttacggttcctggccttttgctggccttttgctcacatgttctttcctgcgttatcccctgattctgtggataaccgtattaccgcctttgagtgagctgataccgctcgccgcagccgaacgaccgagcgcagcgagtcagtgagcgaggaagcggaagagcgcctgatgcggtattttctccttacgcatctgtgcggtatttcacaccgcatatatggtgcactctcagtacaatctgctctgatgccgcatagttaagccagtatacactccgctatcgctacgtgactgggtcatggctgcgccccgacacccgccaacacccgctgacgcgccctgacgggcttgtctgctcccggcatccgcttacagacaagctgtgaccgtctccgggagctgcatgtgtcagaggttttcaccgtcatcaccgaaacgcgcgaggcagctgcggtaaagctcatcagcgtggtcgtgaagcgattcacagatgtctgcctgttcatccgcgtccagctcgttgagtttctccagaagcgttaatgtctggcttctgataaagcgggccatgttaagggcggttttttcctgtttggtcactgatgcctccgtgtaagggggatttctgttcatgggggtaatgataccgatgaaacgagagaggatgctcacgatacgggttactgatgatgaacatgcccggttactggaacgttgtgagggtaaacaactggcggtatggatgcggcgggaccagagaaaaatcactcagggtcaatgccagcgcttcgttaatacagatgtaggtgttccacagggtagccagcagcatcctgcgatgcagatccggaacataatggtgcagggcgctgacttccgcgtttccagactttacgaaacacggaaaccgaagaccattcatgttgttgctcaggtcgcagacgttttgcagcagcagtcgcttcacgttcgctcgcgtatcggtgattcattctgctaaccagtaaggcaaccccgccagcctagccgggtcctcaacgacaggagcacgatcatgcgcacccgtggggccgccatgccggcgataatggcctgcttctcgccgaaacgtttggtggcgggaccagtgacgaaggcttgagcgagggcgtgcaagattccgaataccgcaagcgacaggccgatcatcgtcgcgctccagcgaaagcggtcctcgccgaaaatgacccagagcgctgccggcacctgtcctacgagttgcatgataaagaagacagtcataagtgcggcgacgatagtcatgccccgcgcccaccggaaggagctgactgggttgaaggctctcaagggcatcggtcgagatcccggtgcctaatgagtgagctaacttacattaattgcgttgcgctcactgcccgctttccagtcgggaaacctgtcgtgccagctgcattaatgaatcggccaacgcgcggggagaggcggtttgcgtattgggcgccagggtggtttttcttttcaccagtgagacgggcaacagctgattgcccttcaccgcctggccctgagagagttgcagcaagcggtccacgctggtttgccccagcaggcgaaaatcctgtttgatggtggttaacggcgggatataacatgagctgtcttcggtatcgtcgtatcccactaccgagatatccgcaccaacgcgcagcccggactcggtaatggcgcgcattgcgcccagcgccatctgatcgttggcaaccagcatcgcagtgggaacgatgccctcattcagcatttgcatggtttgttgaaaaccggacatggcactccagtcgccttcccgttccgctatcggctgaatttgattgcgagtgagatatttatgccagccagccagacgcagacgcgccgagacagaacttaatgggcccgctaacagcgcgatttgctggtgacccaatgcgaccagatgctccacgcccagtcgcgtaccgtcttcatgggagaaaataatactgttgatgggtgtctggtcagagacatcaagaaataacgccggaacattagtgcaggcagcttccacagcaatggcatcctggtcatccagcggatagttaatgatcagcccactgacgcgttgcgcgagaagattgtgcaccgccgctttacaggcttcgacgccgcttcgttctaccatcgacaccaccacgctggcacccagttgatcggcgcgagatttaatcgccgcgacaatttgcgacggcgcgtgcagggccagactggaggtggcaacgccaatcagcaacgactgtttgcccgccagttgttgtgccacgcggttgggaatgtaattcagctccgccatcgccgcttccactttttcccgcgttttcgcagaaacgtggctggcctggttcaccacgcgggaaacggtctgataagagacaccggcatactctgcgacatcgtataacgttactggtttcacattcaccaccctgaattgactctcttccgggcgctatcatgccataccgcgaaaggttttgcgccattcgatggtgtccgggatctcgacgctctcccttatgcgactcctgcattaggaagcagcccagtagtaggttgaggccgttgagcaccgccgccgcaaggaatggtgcatgcaaggagatggcgcccaacagtcccccggccacggggcctgccaccatacccacgccgaaacaagcgctcatgagcccgaagtggcgagcccgatcttccccatcggtgatgtcggcgatataggcgccagcaaccgcacctgtggcgccggtgatgccggccacgatgcgtccggcgtagaggatcgagatctcgatcccgcgaaattaatacgactcactataggggaattgtgagcggataacaattcccctctagaaataattttgtttaactttaagaaggagatatacatatgagagacttagcaaaaaagtttggctacaacgttcgttctatgcgaaaagacaaaggaatatcacaggataagttggctttggctgcagatatagatcgtagctacgtaggcaggatagaacgaggtgaagtgaatatcacactagaaaaagcctaccagatagcaagtgtccttcagtgcgatattcgagagcttctaccactcgagcaccaccaccaccaccactgagatccggctgctaacaaagcccgaaaggaagctgagttggctgctgccaccgctgagcaataactagcataaccccttggggcctctaaacgggtcttgaggggttttttgctgaaaggaggaactatatccggat

SEQ ID NO: 5656 - DNA, 5571 bp, Artificial Sequence
  Description of Artificial Sequence: Synthetic polynucleotide
tggcgaatgggacgcgccctgtagcggcgcattaagcgcggcgggtgtggtggttacgcgcagcgtgaccgctacacttgccagcgccctagcgcccgctcctttcgctttcttcccttcctttctcgccacgttcgccggctttccccgtcaagctctaaatcgggggctccctttagggttccgatttagtgctttacggcacctcgaccccaaaaaacttgattagggtgatggttcacgtagtgggccatcgccctgatagacggtttttcgccctttgacgttggagtccacgttctttaatagtggactcttgttccaaactggaacaacactcaaccctatctcggtctattcttttgatttataagggattttgccgatttcggcctattggttaaaaaatgagctgatttaacaaaaatttaacgcgaattttaacaaaatattaacgtttacaatttcaggtggcacttttcggggaaatgtgcgcggaacccctatttgtttatttttctaaatacattcaaatatgtatccgctcatgagacaataaccctgataaatgcttcaataatattgaaaaaggaagagtatgagtattcaacatttccgtgtcgcccttattcccttttttgcggcattttgccttcctgtttttgctcacccagaaacgctggtgaaagtaaaagatgctgaagatcagttgggtgcacgagtgggttacatcgaactggatctcaacagcggtaagatccttgagagttttcgccccgaagaacgttttccaatgatgagcacttttaaagttctgctatgtggcgcggtattatcccgtattgacgccgggcaagagcaactcggtcgccgcatacactattctcagaatgacttggttgagtactcaccagtcacagaaaagcatcttacggatggcatgacagtaagagaattatgcagtgctgccataaccatgagtgataacactgcggccaacttacttctgacaacgatcggaggaccgaaggagctaaccgcttttttgcacaacatgggggatcatgtaactcgccttgatcgttgggaaccggagctgaatgaagccataccaaacgacgagcgtgacaccacgatgcctgcagcaatggcaacaacgttgcgcaaactattaactggcgaactacttactctagcttcccggcaacaattaatagactggatggaggcggataaagttgcaggaccacttctgcgctcggcccttccggctggctggtttattgctgataaatctggagccggtgagcgtgggtctcgcggtatcattgcagcactggggccagatggtaagccctcccgtatcgtagttatctacacgacggggagtcaggcaactatggatgaacgaaatagacagatcgctgagataggtgcctcactgattaagcattggtaactgtcagaccaagtttactcatatatactttagattgatttaaaacttcatttttaatttaaaaggatctaggtgaagatcctttttgataatctcatgaccaaaatcccttaacgtgagttttcgttccactgagcgtcagaccccgtagaaaagatcaaaggatcttcttgagatcctttttttctgcgcgtaatctgctgcttgcaaacaaaaaaaccaccgctaccagcggtggtttgtttgccggatcaagagctaccaactctttttccgaaggtaactggcttcagcagagcgcagataccaaatactgtccttctagtgtagccgtagttaggccaccacttcaagaactctgtagcaccgcctacatacctcgctctgctaatcctgttaccagtggctgctgccagtggcgataagtcgtgtcttaccgggttggactcaagacgatagttaccggataaggcgcagcggtcgggctgaacggggggttcgtgcacacagcccagcttggagcgaacgacctacaccgaactgagatacctacagcgtgagctatgagaaagcgccacgcttcccgaagggagaaaggcggacaggtatccggtaagcggcagggtcggaacaggagagcgcacgagggagcttccagggggaaacgcctggtatctttatagtcctgtcgggtttcgccacctctgacttgagcgtcgatttttgtgatgctcgtcaggggggcggagcctatggaaaaacgccagcaacgcggcctttttacggttcctggccttttgctggccttttgctcacatgttctttcctgcgttatcccctgattctgtggataaccgtattaccgcctttgagtgagctgataccgctcgccgcagccgaacgaccgagcgcagcgagtcagtgagcgaggaagcggaagagcgcctgatgcggtattttctccttacgcatctgtgcggtatttcacaccgcatatatggtgcactctcagtacaatctgctctgatgccgcatagttaagccagtatacactccgctatcgctacgtgactgggtcatggctgcgccccgacacccgccaacacccgctgacgcgccctgacgggcttgtctgctcccggcatccgcttacagacaagctgtgaccgtctccgggagctgcatgtgtcagaggttttcaccgtcatcaccgaaacgcgcgaggcagctgcggtaaagctcatcagcgtggtcgtgaagcgattcacagatgtctgcctgttcatccgcgtccagctcgttgagtttctccagaagcgttaatgtctggcttctgataaagcgggccatgttaagggcggttttttcctgtttggtcactgatgcctccgtgtaagggggatttctgttcatgggggtaatgataccgatgaaacgagagaggatgctcacgatacgggttactgatgatgaacatgcccggttactggaacgttgtgagggtaaacaactggcggtatggatgcggcgggaccagagaaaaatcactcagggtcaatgccagcgcttcgttaatacagatgtaggtgttccacagggtagccagcagcatcctgcgatgcagatccggaacataatggtgcagggcgctgacttccgcgtttccagactttacgaaacacggaaaccgaagaccattcatgttgttgctcaggtcgcagacgttttgcagcagcagtcgcttcacgttcgctcgcgtatcggtgattcattctgctaaccagtaaggcaaccccgccagcctagccgggtcctcaacgacaggagcacgatcatgcgcacccgtggggccgccatgccggcgataatggcctgcttctcgccgaaacgtttggtggcgggaccagtgacgaaggcttgagcgagggcgtgcaagattccgaataccgcaagcgacaggccgatcatcgtcgcgctccagcgaaagcggtcctcgccgaaaatgacccagagcgctgccggcacctgtcctacgagttgcatgataaagaagacagtcataagtgcggcgacgatagtcatgccccgcgcccaccggaaggagctgactgggttgaaggctctcaagggcatcggtcgagatcccggtgcctaatgagtgagctaacttacattaattgcgttgcgctcactgcccgctttccagtcgggaaacctgtcgtgccagctgcattaatgaatcggccaacgcgcggggagaggcggtttgcgtattgggcgccagggtggtttttcttttcaccagtgagacgggcaacagctgattgcccttcaccgcctggccctgagagagttgcagcaagcggtccacgctggtttgccccagcaggcgaaaatcctgtttgatggtggttaacggcgggatataacatgagctgtcttcggtatcgtcgtatcccactaccgagatatccgcaccaacgcgcagcccggactcggtaatggcgcgcattgcgcccagcgccatctgatcgttggcaaccagcatcgcagtgggaacgatgccctcattcagcatttgcatggtttgttgaaaaccggacatggcactccagtcgccttcccgttccgctatcggctgaatttgattgcgagtgagatatttatgccagccagccagacgcagacgcgccgagacagaacttaatgggcccgctaacagcgcgatttgctggtgacccaatgcgaccagatgctccacgcccagtcgcgtaccgtcttcatgggagaaaataatactgttgatgggtgtctggtcagagacatcaagaaataacgccggaacattagtgcaggcagcttccacagcaatggcatcctggtcatccagcggatagttaatgatcagcccactgacgcgttgcgcgagaagattgtgcaccgccgctttacaggcttcgacgccgcttcgttctaccatcgacaccaccacgctggcacccagttgatcggcgcgagatttaatcgccgcgacaatttgcgacggcgcgtgcagggccagactggaggtggcaacgccaatcagcaacgactgtttgcccgccagttgttgtgccacgcggttgggaatgtaattcagctccgccatcgccgcttccactttttcccgcgttttcgcagaaacgtggctggcctggttcaccacgcgggaaacggtctgataagagacaccggcatactctgcgacatcgtataacgttactggtttcacattcaccaccctgaattgactctcttccgggcgctatcatgccataccgcgaaaggttttgcgccattcgatggtgtccgggatctcgacgctctcccttatgcgactcctgcattaggaagcagcccagtagtaggttgaggccgttgagcaccgccgccgcaaggaatggtgcatgcaaggagatggcgcccaacagtcccccggccacggggcctgccaccatacccacgccgaaacaagcgctcatgagcccgaagtggcgagcccgatcttccccatcggtgatgtcggcgatataggcgccagcaaccgcacctgtggcgccggtgatgccggccacgatgcgtccggcgtagaggatcgagatctcgatcccgcgaaattaatacgactcactataggggaattgtgagcggataacaattcccctctagaaataattttgtttaactttaagaaggagatatacatatgaaagacttagcgaaacggtttggcaccaatctacgcaataaacgccgagataaaggtgtgtcccaagaccaactagcgttgcaagcaaacattgacagaagctatgttgggcgaattgaacgaggagaagtaaacatcacactcgaaaaagcctatcaattagcgcatgtacttgggtgtgatgttagagagcttcttccgctcgagcaccaccaccaccaccactgagatccggctgctaacaaagcccgaaaggaagctgagttggctgctgccaccgctgagcaataactagcataaccccttggggcctctaaacgggtcttgaggggttttttgctgaaaggaggaactatatccggat

SEQ ID NO: 5657 - DNA, 5420 bp, Artificial Sequence
  Description of Artificial Sequence: Synthetic polynucleotide
ggggaattgtgagcggataacaattcccctctagaaataattttgtttaactttaagaaggagatataccatgggcagcagccatcaccatcatcaccacagccaggatccgaattcgagctcggcgcgcctgcaggtcgacaagcttgcggccgcataatgcttaagtcgaacagaaagtaatcgtattgtacacggccgcataatcgaaattaatacgactcactataggggaattgtgagcggataacaattccccatcttagtatattagttaagtataagaaggagatatacatatggcagatctcaattggatatcggccggccacgcgatcgctgacgtcggtaccctcgagtctggtaaagaaaccgctgctgcgaaatttgaacgccagcacatggactcgtctactagcgcagcttaattaacctaggctgctgccaccgctgagcaataactagcataaccccttggggcctctaaacgggtcttgaggggttttttgctgaaaggaggaactatatccggattggcgaatgggacgcgccctgtagcggcgcattaagcgcggcgggtgtggtggttacgcgcagcgtgaccgctacacttgccagcgccctagcgcccgctcctttcgctttcttcccttcctttctcgccacgttcgccggctttccccgtcaagctctaaatcgggggctccctttagggttccgatttagtgctttacggcacctcgaccccaaaaaacttgattagggtgatggttcacgtagtgggccatcgccctgatagacggtttttcgccctttgacgttggagtccacgttctttaatagtggactcttgttccaaactggaacaacactcaaccctatctcggtctattcttttgatttataagggattttgccgatttcggcctattggttaaaaaatgagctgatttaacaaaaatttaacgcgaattttaacaaaatattaacgtttacaatttctggcggcacgatggcatgagattatcaaaaaggatcttcacctagatccttttaaattaaaaatgaagttttaaatcaatctaaagtatatatgagtaaacttggtctgacagttaccaatgcttaatcagtgaggcacctatctcagcgatctgtctatttcgttcatccatagttgcctgactccccgtcgtgtagataactacgatacgggagggcttaccatctggccccagtgctgcaatgataccgcgagacccacgctcaccggctccagatttatcagcaataaaccagccagccggaagggccgagcgcagaagtggtcctgcaactttatccgcctccatccagtctattaattgttgccgggaagctagagtaagtagttcgccagttaatagtttgcgcaacgttgttgccattgctacaggcatcgtggtgtcacgctcgtcgtttggtatggcttcattcagctccggttcccaacgatcaaggcgagttacatgatcccccatgttgtgcaaaaaagcggttagctccttcggtcctccgatcgttgtcagaagtaagttggccgcagtgttatcactcatggttatggcagcactgcataattctcttactgtcatgccatccgtaagatgcttttctgtgactggtgagtactcaaccaagtcattctgagaatagtgtatgcggcgaccgagttgctcttgcccggcgtcaatacgggataataccgcgccacatagcagaactttaaaagtgctcatcattggaaaacgttcttcggggcgaaaactctcaaggatcttaccgctgttgagatccagttcgatgtaacccactcgtgcacccaactgatcttcagcatcttttactttcaccagcgtttctgggtgagcaaaaacaggaaggcaaaatgccgcaaaaaagggaataagggcgacacggaaatgttgaatactcatactcttcctttttcaatcatgattgaagcatttatcagggttattgtctcatgagcggatacatatttgaatgtatttagaaaaataaacaaataggtcatgaccaaaatcccttaacgtgagttttcgttccactgagcgtcagaccccgtagaaaagatcaaaggatcttcttgagatcctttttttctgcgcgtaatctgctgcttgcaaacaaaaaaaccaccgctaccagcggtggtttgtttgccggatcaagagctaccaactctttttccgaaggtaactggcttcagcagagcgcagataccaaatactgtccttctagtgtagccgtagttaggccaccacttcaagaactctgtagcaccgcctacatacctcgctctgctaatcctgttaccagtggctgctgccagtggcgataagtcgtgtcttaccgggttggactcaagacgatagttaccggataaggcgcagcggtcgggctgaacggggggttcgtgcacacagcccagcttggagcgaacgacctacaccgaactgagatacctacagcgtgagctatgagaaagcgccacgcttcccgaagggagaaaggcggacaggtatccggtaagcggcagggtcggaacaggagagcgcacgagggagcttccagggggaaacgcctggtatctttatagtcctgtcgggtttcgccacctctgacttgagcgtcgatttttgtgatgctcgtcaggggggcggagcctatggaaaaacgccagcaacgcggcctttttacggttcctggccttttgctggccttttgctcacatgttctttcctgcgttatcccctgattctgtggataaccgtattaccgcctttgagtgagctgataccgctcgccgcagccgaacgaccgagcgcagcgagtcagtgagcgaggaagcggaagagcgcctgatgcggtattttctccttacgcatctgtgcggtatttcacaccgcatatatggtgcactctcagtacaatctgctctgatgccgcatagttaagccagtatacactccgctatcgctacgtgactgggtcatggctgcgccccgacacccgccaacacccgctgacgcgccctgacgggcttgtctgctcccggcatccgcttacagacaagctgtgaccgtctccgggagctgcatgtgtcagaggttttcaccgtcatcaccgaaacgcgcgaggcagctgcggtaaagctcatcagcgtggtcgtgaagcgattcacagatgtctgcctgttcatccgcgtccagctcgttgagtttctccagaagcgttaatgtctggcttctgataaagcgggccatgttaagggcggttttttcctgtttggtcactgatgcctccgtgtaagggggatttctgttcatgggggtaatgataccgatgaaacgagagaggatgctcacgatacgggttactgatgatgaacatgcccggttactggaacgttgtgagggtaaacaactggcggtatggatgcggcgggaccagagaaaaatcactcagggtcaatgccagcgcttcgttaatacagatgtaggtgttccacagggtagccagcagcatcctgcgatgcagatccggaacataatggtgcagggcgctgacttccgcgtttccagactttacgaaacacggaaaccgaagaccattcatgttgttgctcaggtcgcagacgttttgcagcagcagtcgcttcacgttcgctcgcgtatcggtgattcattctgctaaccagtaaggcaaccccgccagcctagccgggtcctcaacgacaggagcacgatcatgctagtcatgccccgcgcccaccggaaggagctgactgggttgaaggctctcaagggcatcggtcgagatcccggtgcctaatgagtgagctaacttacattaattgcgttgcgctcactgcccgctttccagtcgggaaacctgtcgtgccagctgcattaatgaatcggccaacgcgcggggagaggcggtttgcgtattgggcgccagggtggtttttcttttcaccagtgagacgggcaacagctgattgcccttcaccgcctggccctgagagagttgcagcaagcggtccacgctggtttgccccagcaggcgaaaatcctgtttgatggtggttaacggcgggatataacatgagctgtcttcggtatcgtcgtatcccactaccgagatgtccgcaccaacgcgcagcccggactcggtaatggcgcgcattgcgcccagcgccatctgatcgttggcaaccagcatcgcagtgggaacgatgccctcattcagcatttgcatggtttgttgaaaaccggacatggcactccagtcgccttcccgttccgctatcggctgaatttgattgcgagtgagatatttatgccagccagccagacgcagacgcgccgagacagaacttaatgggcccgctaacagcgcgatttgctggtgacccaatgcgaccagatgctccacgcccagtcgcgtaccgtcttcatgggagaaaataatactgttgatgggtgtctggtcagagacatcaagaaataacgccggaacattagtgcaggcagcttccacagcaatggcatcctggtcatccagcggatagttaatgatcagcccactgacgcgttgcgcgagaagattgtgcaccgccgctttacaggcttcgacgccgcttcgttctaccatcgacaccaccacgctggcacccagttgatcggcgcgagatttaatcgccgcgacaatttgcgacggcgcgtgcagggccagactggaggtggcaacgccaatcagcaacgactgtttgcccgccagttgttgtgccacgcggttgggaatgtaattcagctccgccatcgccgcttccactttttcccgcgttttcgcagaaacgtggctggcctggttcaccacgcgggaaacggtctgataagagacaccggcatactctgcgacatcgtataacgttactggtttcacattcaccaccctgaattgactctcttccgggcgctatcatgccataccgcgaaaggttttgcgccattcgatggtgtccgggatctcgacgctctcccttatgcgactcctgcattaggaagcagcccagtagtaggttgaggccgttgagcaccgccgccgcaaggaatggtgcatgcaaggagatggcgcccaacagtcccccggccacggggcctgccaccatacccacgccgaaacaagcgctcatgagcccgaagtggcgagcccgatcttccccatcggtgatgtcggcgatataggcgccagcaaccgcacctgtggcgccggtgatgccggccacgatgcgtccggcgtagaggatcgagatcgatctcgatcccgcgaaattaatacgactcactata

SEQ ID NO: 5658 - DNA, 5148 bp, Artificial Sequence
  Description of Artificial Sequence: Synthetic polynucleotide
ctcgggccgtctcttgggcttgatcggccttcttgcgcatctcacgcgctcctgcggcggcctgtagggcaggctcatacccctgccgaaccgcttttgtcagccggtcggccacggcttccggcgtctcaacgcgctttgagattcccagcttttcggccaatccctgcggtgcataggcgcgtggctcgaccgcttgcgggctgatggtgacgtggcccactggtggccgctccagggcctcgtagaacgcctgaatgcgcgtgtgacgtgccttgctgccctcgatgccccgttgcagccctagatcggccacagcggccgcaaacgtggtctggtcgcgggtcatctgcgctttgttgccgatgaactccttggccgacagcctgccgtcctgcgtcagcggcaccacgaacgcggtcatgtgcgggctggtttcgtcacggtggatgctggccgtcacgatgcgatccgccccgtacttgtccgccagccacttgtgcgccttctcgaagaacgccgcctgctgttcttggctggccgacttccaccattccgggctggccgtcatgacgtactcgaccgccaacacagcgtccttgcgccgcttctctggcagcaactcgcgcagtcggcccatcgcttcatcggtgctgctggccgcccagtgctcgttctctggcgtcctgctggcgtcagcgttgggcgtctcgcgctcgcggtaggcgtgcttgagactggccgccacgttgcccattttcgccagcttcttgcatcgcatgatcgcgtatgccgccatgcctgcccctcccttttggtgtccaaccggctcgacgggggcagcgcaaggcggtgcctccggcgggccactcaatgcttgagtatactcactagactttgcttcgcaaagtcgtgaccgcctacggcggctgcggcgccctacgggcttgctctccgggcttcgccctgcgcggtcgctgcgctcccttgccagcccgtggatatgtggacgatggccgcgagcggccaccggctggctcgcttcgctcggcccgtggacaaccctgctggacaagctgatggacaggctgcgcctgcccacgagcttgaccacagggattgcccaccggctacccagccttcgaccacatacccaccggctccaactgcgcggcctgcggccttgccccatcaatttttttaattttctctggggaaaagcctccggcctgcggcctgcgcgcttcgcttgccggttggacaccaagtggaaggcgggtcaaggctcgcgcagcgaccgcgcagcggcttggccttgacgcgcctggaacgacccaagcctatgcgagtgggggcagtcgaagggcgaagcccgcccgcctgccccccgagcctcacggcggcgagtgcgggggttccaagggggcagcgccaccttgggcaaggccgaaggccgcgcagtcgatcaacaagccccggaggggccactttttgccggagggggagccgcgccgaaggcgtgggggaaccccgcaggggtgcccttctttgggcaccaaagaactagatatagggcgaaatgcgaaagacttaaaaatcaacaacttaaaaaaggggggtacgcaacagctcattgcggcaccccccgcaatagctcattgcgtaggttaaagaaaatctgtaattgactgccacttttacgcaacgcataattgttgtcgcgctgccgaaaagttgcagctgattgcgcatggtgccgcaaccgtgcggcacccctaccgcatggagataagcatggccacgcagtccagagaaatcggcattcaagccaagaacaagcccggtcactgggtgcaaacggaacgcaaagcgcatgaggcgtgggccgggcttattgcgaggaaacccacggcggcaatgctgctgcatcacctcgtggcgcagatgggccaccagaacgccgtggtggtcagccagaagacactttccaagctcatcggacgttctttgcggacggtccaatacgcagtcaaggacttggtggccgagcgctggatctccgtcgtgaagctcaacggccccggcaccgtgtcggcctacgtggtcaatgaccgcgtggcgtggggccagccccgcgaccagttgcgcctgtcggtgttcagtgccgccgtggtggttgatcacgacgaccaggacgaatcgctgttggggcatggcgacctgcgccgcatcccgaccctgtatccgggcgagcagcaactaccgaccggccccggcgaggagccgcccagccagcccggcattccgggcatggaaccagacctgccagccttgaccgaaacggaggaatgggaacggcgcgggcagcagcgcctgccgatgcccgatgagccgtgttttctggacgatggcgagccgttggagccgccgacacgggtcacgctgccgcgccggtagcacttgggttgcgcagcaacccgtaagtgcgctgttccagactatcggctgtagccgcctcgccgccctataccttgtctgcctccccgcgttgcgtcgcggtgcatggagccgggccacctcgacctgaatggaagccggcggcacctcgctaacggattcaccgtttttatcaggctctgggaggcagaataaatgatcatatcgtcaattattacctccacggggagagcctgagcaaactggcctcaggcatttgagaagcacacggtcacactgcttccggtagtcaataaaccggtaaaccagcaatagacataagcggctatttaacgaccctgccctgaaccgacgaccgggtcgaatttgctttcgaatttctgccattcatccgcttattatcacttattcaggcgtagcaaccaggcgtttaagggcaccaataactgccttaaaaaaattacgccccgccctgccactcatcgcagtacggcctattggttaaaaaatgagctgatttaacaaaaatttaacgcgaattttaacaaaatattaacgcttacaatttccattcgccattcaggctgcgcaactgttgggaagggcgatcggtgcgggcctcttcgctattacgccagctggcgaaagggggatgtgctgcaaggcgattaagttgggtaacgccagggttttcccagtcacgacgttgtaaaacgacggccagtgagcgcgcgtaatacgactcactatagggcgaattggagctccaccgcggtggcggccgctctagaactagtggatcccccgggctgcaggaattcgatatcaagcttatcgataccgtcgacctcgagggggggcccggtacccagcttttgttccctttagtgagggttaattgcgcgcttggcgtaatcatggtcatagctgtttcctgtgtgaaattgttatccgctcacaattccacacaacatacgagccggaagcataaagtgtaaagcctggggtgcctaatgagtgagctaactcacattaattgcgttgcgctcactgcccgctttccagtcgggaaacctgtcgtgccagctgcattaatgaatcggccaacgcgcggggagaggcggtttgcgtattgggcgcatgcataaaaactgttgtaattcattaagcattctgccgacatggaagccatcacaaacggcatgatgaacctgaatcgccagcggcatcagcaccttgtcgccttgcgtataatatttgcccatgggggtgggcgaagaactccagcatgagatccccgcgctggaggatcatccagccggcgtcccggaaaacgattccgaagcccaacctttcatagaaggcggcggtggaatcgaaatctcgtgatggcaggttgggcgtcgcttggtcggtcatttcgaaccccagagtcccgctcagaagaactcgtcaagaaggcgatagaaggcgatgcgctgcgaatcgggagcggcgataccgtaaagcacgaggaagcggtcagcccattcgccgccaagctcttcagcaatatcacgggtagccaacgctatgtcctgatagcggtccgccacacccagccggccacagtcgatgaatccagaaaagcggccattttccaccatgatattcggcaagcaggcatcgccatgggtcacgacgagatcctcgccgtcgggcatgcgcgccttgagcctggcgaacagttcggctggcgcgagcccctgatgctcttcgtccagatcatcctgatcgacaagaccggcttccatccgagtacgtgctcgctcgatgcgatgtttcgcttggtggtcgaatgggcaggtagccggatcaagcgtatgcagccgccgcattgcatcagccatgatggatactttctcggcaggagcaaggtgagatgacaggagatcctgccccggcacttcgcccaatagcagccagtcccttcccgcttcagtgacaacgtcgagcacagctgcgcaaggaacgcccgtcgtggccagccacgatagccgcgctgcctcgtcctgcagttcattcagggcaccggacaggtcggtcttgacaaaaagaaccgggcgcccctgcgctgacagccggaacacggcggcatcagagcagccgattgtctgttgtgcccagtcatagccgaatagcctctccacccaagcggccggagaacctgcgtgcaatccatcttgttcaatcatgcgaaacgatcctcatcctgtctcttgatcagatcttgatcccctgcgccatcagatccttggcggcaagaaagccatccagtttactttgcagggcttcccaaccttaccagagggcgccccagctggcaattccggttcgcttgctgtccataaaaccgcccagtctagctatcgccatgtaagcccactgcaagctacctgctttctctttgcgcttgcgttttcccttgtccagatagcccagtagctgacattcatcccaggtggcacttttcggggaaatgtgcgcgcccgcgttcctgctggcgctgggcctgtttctggcgctggacttcccgctgttccgtcagcagcttttcgcccacggccttgatgatcgcggcggccttggcctgcatatcccgattcaacggccccagggcgtccagaacgggcttcaggcgctcccgaaggt

SEQ ID NO: 5659 - DNA, 8363 bp, Artificial Sequence
  Description of Artificial Sequence: Synthetic polynucleotide
tgcataaaaactgttgtaattcattaagcattctgccgacatggaagccatcacaaacggcatgatgaacctgaatcgccagcggcatcagcaccttgtcgccttgcgtataatatttgcccatgggggtgggcgaagaactccagcatgagatccccgcgctggaggatcatccagccggcgtcccggaaaacgattccgaagcccaacctttcatagaaggcggcggtggaatcgaaatctcgtgatggcaggttgggcgtcgcttggtcggtcatttcgaaccccagagtcccgctcagaagaactcgtcaagaaggcgatagaaggcgatgcgctgcgaatcgggagcggcgataccgtaaagcacgaggaagcggtcagcccattcgccgccaagctcttcagcaatatcacgggtagccaacgctatgtcctgatagcggtccgccacacccagccggccacagtcgatgaatccagaaaagcggccattttccaccatgatattcggcaagcaggcatcgccatgggtcacgacgagatcctcgccgtcgggcatgcgcgccttgagcctggcgaacagttcggctggcgcgagcccctgatgctcttcgtccagatcatcctgatcgacaagaccggcttccatccgagtacgtgctcgctcgatgcgatgtttcgcttggtggtcgaatgggcaggtagccggatcaagcgtatgcagccgccgcattgcatcagccatgatggatactttctcggcaggagcaaggtgagatgacaggagatcctgccccggcacttcgcccaatagcagccagtcccttcccgcttcagtgacaacgtcgagcacagctgcgcaaggaacgcccgtcgtggccagccacgatagccgcgctgcctcgtcctgcagttcattcagggcaccggacaggtcggtcttgacaaaaagaaccgggcgcccctgcgctgacagccggaacacggcggcatcagagcagccgattgtctgttgtgcccagtcatagccgaatagcctctccacccaagcggccggagaacctgcgtgcaatccatcttgttcaatcatgcgaaacgatcctcatcctgtctcttgatcagatcttgatcccctgcgccatcagatccttggcggcaagaaagccatccagtttactttgcagggcttcccaaccttaccagagggcgccccagctggcaattccggttcgcttgctgtccataaaaccgcccagtctagctatcgccatgtaagcccactgcaagctacctgctttctctttgcgcttgcgttttcccttgtccagatagcccagtagctgacattcatcccaggtggcacttttcggggaaatgtgcgcgcccgcgttcctgctggcgctgggcctgtttctggcgctggacttcccgctgttccgtcagcagcttttcgcccacggccttgatgatcgcggcggccttggcctgcatatcccgattcaacggccccagggcgtccagaacgggcttcaggcgctcccgaaggtctcgggccgtctcttgggcttgatcggccttcttgcgcatctcacgcgctcctgcggcggcctgtagggcaggctcatacccctgccgaaccgcttttgtcagccggtcggccacggcttccggcgtctcaacgcgctttgagattcccagcttttcggccaatccctgcggtgcataggcgcgtggctcgaccgcttgcgggctgatggtgacgtggcccactggtggccgctccagggcctcgtagaacgcctgaatgcgcgtgtgacgtgccttgctgccctcgatgccccgttgcagccctagatcggccacagcggccgcaaacgtggtctggtcgcgggtcatctgcgctttgttgccgatgaactccttggccgacagcctgccgtcctgcgtcagcggcaccacgaacgcggtcatgtgcgggctggtttcgtcacggtggatgctggccgtcacgatgcgatccgccccgtacttgtccgccagccacttgtgcgccttctcgaagaacgccgcctgctgttcttggctggccgacttccaccattccgggctggccgtcatgacgtactcgaccgccaacacagcgtccttgcgccgcttctctggcagcaactcgcgcagtcggcccatcgcttcatcggtgctgctggccgcccagtgctcgttctctggcgtcctgctggcgtcagcgttgggcgtctcgcgctcgcggtaggcgtgcttgagactggccgccacgttgcccattttcgccagcttcttgcatcgcatgatcgcgtatgccgccatgcctgcccctcccttttggtgtccaaccggctcgacgggggcagcgcaaggcggtgcctccggcgggccactcaatgcttgagtatactcactagactttgcttcgcaaagtcgtgaccgcctacggcggctgcggcgccctacgggcttgctctccgggcttcgccctgcgcggtcgctgcgctcccttgccagcccgtggatatgtggacgatggccgcgagcggccaccggctggctcgcttcgctcggcccgtggacaaccctgctggacaagctgatggacaggctgcgcctgcccacgagcttgaccacagggattgcccaccggctacccagccttcgaccacatacccaccggctccaactgcgcggcctgcggccttgccccatcaatttttttaattttctctggggaaaagcctccggcctgcggcctgcgcgcttcgcttgccggttggacaccaagtggaaggcgggtcaaggctcgcgcagcgaccgcgcagcggcttggccttgacgcgcctggaacgacccaagcctatgcgagtgggggcagtcgaagggcgaagcccgcccgcctgccccccgagcctcacggcggcgagtgcgggggttccaagggggcagcgccaccttgggcaaggccgaaggccgcgcagtcgatcaacaagccccggaggggccactttttgccggagggggagccgcgccgaaggcgtgggggaaccccgcaggggtgcccttctttgggcaccaaagaactagatatagggcgaaatgcgaaagacttaaaaatcaacaacttaaaaaaggggggtacgcaacagctcattgcggcaccccccgcaatagctcattgcgtaggttaaagaaaatctgtaattgactgccacttttacgcaacgcataattgttgtcgcgctgccgaaaagttgcagctgattgcgcatggtgccgcaaccgtgcggcacccctaccgcatggagataagcatggccacgcagtccagagaaatcggcattcaagccaagaacaagcccggtcactgggtgcaaacggaacgcaaagcgcatgaggcgtgggccgggcttattgcgaggaaacccacggcggcaatgctgctgcatcacctcgtggcgcagatgggccaccagaacgccgtggtggtcagccagaagacactttccaagctcatcggacgttctttgcggacggtccaatacgcagtcaaggacttggtggccgagcgctggatctccgtcgtgaagctcaacggccccggcaccgtgtcggcctacgtggtcaatgaccgcgtggcgtggggccagccccgcgaccagttgcgcctgtcggtgttcagtgccgccgtggtggttgatcacgacgaccaggacgaatcgctgttggggcatggcgacctgcgccgcatcccgaccctgtatccgggcgagcagcaactaccgaccggccccggcgaggagccgcccagccagcccggcattccgggcatggaaccagacctgccagccttgaccgaaacggaggaatgggaacggcgcgggcagcagcgcctgccgatgcccgatgagccgtgttttctggacgatggcgagccgttggagccgccgacacgggtcacgctgccgcgccggtagcacttgggttgcgcagcaacccgtaagtgcgctgttccagactatcggctgtagccgcctcgccgccctataccttgtctgcctccccgcgttgcgtcgcggtgcatggagccgggccacctcgacctgaatggaagccggcggcacctcgctaacggattcaccgtttttatcaggctctgggaggcagaataaatgatcatatcgtcaattattacctccacggggagagcctgagcaaactggcctcaggcatttgagaagcacacggtcacactgcttccggtagtcaataaaccggtaaaccagcaatagacataagcggctatttaacgaccctgccctgaaccgacgaccgggtcgaatttgctttcgaatttctgccattcatccgcttattatcacttattcaggcgtagcaaccaggcgtttaagggcaccaataactgccttaaaaaaattacgccccgccctgccactcatcgcagtacggcctattggttaaaaaatgagctgatttaacaaaaatttaacgcgaattttaacaaaatattaacgcttacaatttccattcgccattcaggctgcgcaactgttgggaagggcgatcggtgcgggcctcttcgctattacgccagctggcgaaagggggatgtgctgcaaggcgattaagttgggtaacgccagggttttcccagtcacgacgttgtaaaacgacggccagtgagcgcgcgtaatacgactcactatagggcgaattggagctccaccgcggtggcggccgctctagaactagtgttagcaactctcgacagtagatttgaacatagaaaaataaatgcggattatagtccgtggaaaagttctcttcaagaatagatagtctttctttttaatgtacttttgaaatgagagacttagcaaaaaagtttggctacaacgttcgttctatgcgaaaagacaaaggaatatcacaggataagttggctttggctgcagatatagatcgtagctacgtaggcaggatagaacgaggtgaagtgaatatcacactagaaaaagcctaccagatagcaagtgtccttcagtgcgatattcgagagcttctaccataaatagattggaagagttcatttactctagttgattatttttgacaccagaccaactggtaatggtagcgaccggcgctcagctggaattccgccgatactgacgggctccaggagtcgtcgccaccaatccccatatggaaaccgtcgatattcagccatgtgccttcttccgcgtgcagcagatggcgatggctggtttccatcagttgctgttgactgtagcggctgatgttgaactggaagtcgccgcgccactggtgtgggccataattcaattcgcgcgtcccgcagcgcagaccgttttcgctcgggaagacgtacggggtatacatgtctgacaatggcagatcccagcggtcaaaacaggcggcagtaaggcggtcgggatagttttcttgcggccctaatccgagccagtttacccgctctgctacctgcgccagctggcagttcaggccaatccgcgccggatgcggtgtatcgctcgccacttcaacatcaacggtaatcgccatttgaccactaccatcaatccggtaggttttccggctgataaataaggttttcccctgatgctgccacgcgtgagcggtcgtaatcagcaccgcatcagcaagtgtatctgccgtgcactgcaacaacgctgcttcggcctggtaatggcccgccgccttccagcgttcgacccaggcgttagggtcaatgcgggtcgcttcacttacgccaatgtcgttatccagcggtgcacgggtgaactgatcgcgcagcggcgtcagcagttgttttttatcgccaatccacatctgtgaaagaaagcctgactggcggttaaattgccaacgcttattacccagctcgatgcaaaaatccatttcgctggtggtcagatgcgggatggcgtgggacgcggcggggagcgtcacactgaggttttccgccagacgccactgctgccaggcgctgatgtgcccggcttctgaccatgcggtcgcgttcggttgcactacgcgtactgtgagccagagttgcccggcgctctccggctgcggtagttcaggcagttcaatcaactgtttaccttgtggagcgacatccagaggcacttcaccgcttgccagcggcttaccatccagcgccaccatccagtgcaggagctcgttatcgctatgacggaacaggtattcgctggtcacttcgatggtttgcccggataaacggaactggaaaaactgctgctggtgttttgcttccgtcagcgctggatgcggcgtgcggtcggcaaagaccagaccgttcatacagaactggcgatcgttcggcgtatcgccaaaatcaccgccgtaagccgaccacgggttgccgttttcatcatatttaatcagcgactgatccacccagtcccagacgaagccgccctgtaaacggggatactgacgaaacgcctgccagtatttagcgaaaccgccaagactgttacccatcgcgtgggcgtattcgcaaaggatcagcgggcgcgtctctccaggtagcgaaagccattttttgatggaccatttcggcacagccgggaagggctggtcttcatccacgcgcgcgtacatcgggcaaataatatcggtggccgtggtgtcggctccgccgccttcatactgcaccgggcgggaaggatcgacagatttgatccagcgatacagcgcgtcgtgattagcgccgtggcctgattcattccccagcgaccagatgatcacactcgggtgattacgatcgcgctgcaccattcgcgttacgcgttcgctcatcgccggtagccagcgcggatcatcggtcagacgattcattggcaccatgccgtgggtttcaatattggcttcatccaccacatacaggccgtagcggtcgcacagcgtgtaccacagcggatggttcggataatgcgaacagcgcacggcgttaaagttgttctgcttcatcagcaggatatcctgcaccatcgtctgctcatccatgacctgaccatgcagaggatgatgctcgtgacggttaacgcctcgaatcagcaacggcttgccgttcagcagcagcagaccattttcaatccgcacctcgcggaaaccgacatcgcaggcttctgcttcaatcagcgtgccgtcggcggtgtgcagttcaaccaccgcacgatagagattcgggatttcggcgctccacagtttcgggttttcgacgttcagacgtagtgtgacgcgatcggcataaccaccacgctcatcgataatttcaccgccgaaaggcgcggtgccgctggcgacctgcgtttcaccctgccataaagaaactgttacccgtaggtagtcacgcaactcgccgcacatctgaacttcagcctccagtacagcgcggctgaaatcatcattaaagcgagtggcaacatggaaatcgctgatttgtgtagtcggtttatgcagcaacgagacgtcacggaaaatgccgctcatccgccacatatcctgatcttccagataactgccgtcactccagcgcagcaccatcaccgcgaggcggttttctccggcgcgtaaaaatgcgctcaggtcaaattcagacggcaaacgactgtcctggccgtaaccgacccagcgcccgttgcaccacagatgaaacgccgagttaacgccatcaaaaataattcgcgtctggccttcctgtagccagctttcatcaacattaaatgtgagcgagtaacaacccgtcggattctccgtgggaacaaacggcggattgaccgtaatgggataggtcacgttggtgtagatgggcgcatcgtaaccgtgcatctgccagtttgaggggacgacgacagtatcggcctcaggaagatcgcactccagccagctttccggcaccgcttctggtgccggaaaccaggcaaagcgccattcgccattcaggctgcgcaactgttgggaagggcgatcggtgcgggcctcttcgctattacgccagctggcgaaagggggatgtgctgcaaggcgattaagttgggtaacgccagggttttcccagtcacgacgttgtaaaacgacggccagtgaatccgtaatcatggtccccctcatagctgtttcctgtgtggttatcagctactttttagtagtaatgaggattatagcccccatttaatgccaaagcaaacagctaagaatttagctgtttggagatggtaatagtattgattttttaaact

SEQ ID NO: 5660 - DNA, 8818 bp, Artificial Sequence
  Description of Artificial Sequence: Synthetic polynucleotide
tgcataaaaactgttgtaattcattaagcattctgccgacatggaagccatcacaaacggcatgatgaacctgaatcgccagcggcatcagcaccttgtcgccttgcgtataatatttgcccatgggggtgggcgaagaactccagcatgagatccccgcgctggaggatcatccagccggcgtcccggaaaacgattccgaagcccaacctttcatagaaggcggcggtggaatcgaaatctcgtgatggcaggttgggcgtcgcttggtcggtcatttcgaaccccagagtcccgctcagaagaactcgtcaagaaggcgatagaaggcgatgcgctgcgaatcgggagcggcgataccgtaaagcacgaggaagcggtcagcccattcgccgccaagctcttcagcaatatcacgggtagccaacgctatgtcctgatagcggtccgccacacccagccggccacagtcgatgaatccagaaaagcggccattttccaccatgatattcggcaagcaggcatcgccatgggtcacgacgagatcctcgccgtcgggcatgcgcgccttgagcctggcgaacagttcggctggcgcgagcccctgatgctcttcgtccagatcatcctgatcgacaagaccggcttccatccgagtacgtgctcgctcgatgcgatgtttcgcttggtggtcgaatgggcaggtagccggatcaagcgtatgcagccgccgcattgcatcagccatgatggatactttctcggcaggagcaaggtgagatgacaggagatcctgccccggcacttcgcccaatagcagccagtcccttcccgcttcagtgacaacgtcgagcacagctgcgcaaggaacgcccgtcgtggccagccacgatagccgcgctgcctcgtcctgcagttcattcagggcaccggacaggtcggtcttgacaaaaagaaccgggcgcccctgcgctgacagccggaacacggcggcatcagagcagccgattgtctgttgtgcccagtcatagccgaatagcctctccacccaagcggccggagaacctgcgtgcaatccatcttgttcaatcatgcgaaacgatcctcatcctgtctcttgatcagatcttgatcccctgcgccatcagatccttggcggcaagaaagccatccagtttactttgcagggcttcccaaccttaccagagggcgccccagctggcaattccggttcgcttgctgtccataaaaccgcccagtctagctatcgccatgtaagcccactgcaagctacctgctttctctttgcgcttgcgttttcccttgtccagatagcccagtagctgacattcatcccaggtggcacttttcggggaaatgtgcgcgcccgcgttcctgctggcgctgggcctgtttctggcgctggacttcccgctgttccgtcagcagcttttcgcccacggccttgatgatcgcggcggccttggcctgcatatcccgattcaacggccccagggcgtccagaacgggcttcaggcgctcccgaaggtctcgggccgtctcttgggcttgatcggccttcttgcgcatctcacgcgctcctgcggcggcctgtagggcaggctcatacccctgccgaaccgcttttgtcagccggtcggccacggcttccggcgtctcaacgcgctttgagattcccagcttttcggccaatccctgcggtgcataggcgcgtggctcgaccgcttgcgggctgatggtgacgtggcccactggtggccgctccagggcctcgtagaacgcctgaatgcgcgtgtgacgtgccttgctgccctcgatgccccgttgcagccctagatcggccacagcggccgcaaacgtggtctggtcgcgggtcatctgcgctttgttgccgatgaactccttggccgacagcctgccgtcctgcgtcagcggcaccacgaacgcggtcatgtgcgggctggtttcgtcacggtggatgctggccgtcacgatgcgatccgccccgtacttgtccgccagccacttgtgcgccttctcgaagaacgccgcctgctgttcttggctggccgacttccaccattccgggctggccgtcatgacgtactcgaccgccaacacagcgtccttgcgccgcttctctggcagcaactcgcgcagtcggcccatcgcttcatcggtgctgctggccgcccagtgctcgttctctggcgtcctgctggcgtcagcgttgggcgtctcgcgctcgcggtaggcgtgcttgagactggccgccacgttgcccattttcgccagcttcttgcatcgcatgatcgcgtatgccgccatgcctgcccctcccttttggtgtccaaccggctcgacgggggcagcgcaaggcggtgcctccggcgggccactcaatgcttgagtatactcactagactttgcttcgcaaagtcgtgaccgcctacggcggctgcggcgccctacgggcttgctctccgggcttcgccctgcgcggtcgctgcgctcccttgccagcccgtggatatgtggacgatggccgcgagcggccaccggctggctcgcttcgctcggcccgtggacaaccctgctggacaagctgatggacaggctgcgcctgcccacgagcttgaccacagggattgcccaccggctacccagccttcgaccacatacccaccggctccaactgcgcggcctgcggccttgccccatcaatttttttaattttctctggggaaaagcctccggcctgcggcctgcgcgcttcgcttgccggttggacaccaagtggaaggcgggtcaaggctcgcgcagcgaccgcgcagcggcttggccttgacgcgcctggaacgacccaagcctatgcgagtgggggcagtcgaagggcgaagcccgcccgcctgccccccgagcctcacggcggcgagtgcgggggttccaagggggcagcgccaccttgggcaaggccgaaggccgcgcagtcgatcaacaagccccggaggggccactttttgccggagggggagccgcgccgaaggcgtgggggaaccccgcaggggtgcccttctttgggcaccaaagaactagatatagggcgaaatgcgaaagacttaaaaatcaacaacttaaaaaaggggggtacgcaacagctcattgcggcaccccccgcaatagctcattgcgtaggttaaagaaaatctgtaattgactgccacttttacgcaacgcataattgttgtcgcgctgccgaaaagttgcagctgattgcgcatggtgccgcaaccgtgcggcacccctaccgcatggagataagcatggccacgcagtccagagaaatcggcattcaagccaagaacaagcccggtcactgggtgcaaacggaacgcaaagcgcatgaggcgtgggccgggcttattgcgaggaaacccacggcggcaatgctgctgcatcacctcgtggcgcagatgggccaccagaacgccgtggtggtcagccagaagacactttccaagctcatcggacgttctttgcggacggtccaatacgcagtcaaggacttggtggccgagcgctggatctccgtcgtgaagctcaacggccccggcaccgtgtcggcctacgtggtcaatgaccgcgtggcgtggggccagccccgcgaccagttgcgcctgtcggtgttcagtgccgccgtggtggttgatcacgacgaccaggacgaatcgctgttggggcatggcgacctgcgccgcatcccgaccctgtatccgggcgagcagcaactaccgaccggccccggcgaggagccgcccagccagcccggcattccgggcatggaaccagacctgccagccttgaccgaaacggaggaatgggaacggcgcgggcagcagcgcctgccgatgcccgatgagccgtgttttctggacgatggcgagccgttggagccgccgacacgggtcacgctgccgcgccggtagcacttgggttgcgcagcaacccgtaagtgcgctgttccagactatcggctgtagccgcctcgccgccctataccttgtctgcctccccgcgttgcgtcgcggtgcatggagccgggccacctcgacctgaatggaagccggcggcacctcgctaacggattcaccgtttttatcaggctctgggaggcagaataaatgatcatatcgtcaattattacctccacggggagagcctgagcaaactggcctcaggcatttgagaagcacacggtcacactgcttccggtagtcaataaaccggtaaaccagcaatagacataagcggctatttaacgaccctgccctgaaccgacgaccgggtcgaatttgctttcgaatttctgccattcatccgcttattatcacttattcaggcgtagcaaccaggcgtttaagggcaccaataactgccttaaaaaaattacgccccgccctgccactcatcgcagtacggcctattggttaaaaaatgagctgatttaacaaaaatttaacgcgaattttaacaaaatattaacgcttacaatttccattcgccattcaggctgcgcaactgttgggaagggcgatcggtgcgggcctcttcgctattacgccagctggcgaaagggggatgtgctgcaaggcgattaagttgggtaacgccagggttttcccagtcacgacgttgtaaaacgacggccagtgagcgcgcgtaatacgactcactatagggcgaattggagctccaccgcggtggcggccgctctagaactagtgtgactcttacaggcaataaaaacttaggattgctaagtatacaaaaatcagtaaaacttagacaatctaagttatctaaaggttgaaaagaaatgtgtaagtgcaaaaagacaaccccatcccagcgaggctcaaagctgcgcgtaaaaaagccaagatcacccaaaaagatttaggggtgaaaattggtatggaacaaagttctgctagcggtcgtatgaatcattacgagaaaggcaggcatgtacctgatattggtacgcttgagcgcatggctgaagagttagatgtgccgctaaactactttttctgtaggagcgaattgagcgctgagttagcgtgcgcaattgataagatgagtgatgaagagaaggcggtgttgttggaaaagctgagaagttaaaagcttggctgttttggcggatgagagaagattttcagcctgatacagattaaatcagaacgcagaagcggtctgataaaacagaatttgcctggcggcagtagcgcggtggtcccacctgaccccatgccgaactcagaagtgaaacgccgtagcgccgatggtagtgtggggtctccccatgcgagagtagggaactgccaggcatcaaataaaacgaaaggctcagtcgaaagactgggcctttcgttttatctgttgtttgtcggtgaacgctctcctgagtaggacaaatccgccgggagcggatttgaacgttgcgaagcaacggcccggagggtggcgggcaggacgcccgccataaactgccaggcatcaaattaagcagaaggccatcctgacggatggcctttttgcgtttctacaaactctagtttattaaagttcacaatttggctccatagaatttgaattatcgggattaacggcaatactaaaacttagatactctaagttttagtggtggcatgtgagggggaccatgattacggattcactggccgtcgttttacaacgtcgtgactgggaaaaccctggcgttacccaacttaatcgccttgcagcacatccccctttcgccagctggcgtaatagcgaagaggcccgcaccgatcgcccttcccaacagttgcgcagcctgaatggcgaatggcgctttgcctggtttccggcaccagaagcggtgccggaaagctggctggagtgcgatcttcctgaggccgatactgtcgtcgtcccctcaaactggcagatgcacggttacgatgcgcccatctacaccaacgtgacctatcccattacggtcaatccgccgtttgttcccacggagaatccgacgggttgttactcgctcacatttaatgttgatgaaagctggctacaggaaggccagacgcgaattatttttgatggcgttaactcggcgtttcatctgtggtgcaacgggcgctgggtcggttacggccaggacagtcgtttgccgtctgaatttgacctgagcgcatttttacgcgccggagaaaaccgcctcgcggtgatggtgctgcgctggagtgacggcagttatctggaagatcaggatatgtggcggatgagcggcattttccgtgacgtctcgttgctgcataaaccgactacacaaatcagcgatttccatgttgccactcgctttaatgatgatttcagccgcgctgtactggaggctgaagttcagatgtgcggcgagttgcgtgactacctacgggtaacagtttctttatggcagggtgaaacgcaggtcgccagcggcaccgcgcctttcggcggtgaaattatcgatgagcgtggtggttatgccgatcgcgtcacactacgtctgaacgtcgaaaacccgaaactgtggagcgccgaaatcccgaatctctatcgtgcggtggttgaactgcacaccgccgacggcacgctgattgaagcagaagcctgcgatgtcggtttccgcgaggtgcggattgaaaatggtctgctgctgctgaacggcaagccgttgctgattcgaggcgttaaccgtcacgagcatcatcctctgcatggtcaggtcatggatgagcagacgatggtgcaggatatcctgctgatgaagcagaacaactttaacgccgtgcgctgttcgcattatccgaaccatccgctgtggtacacgctgtgcgaccgctacggcctgtatgtggtggatgaagccaatattgaaacccacggcatggtgccaatgaatcgtctgaccgatgatccgcgctggctaccggcgatgagcgaacgcgtaacgcgaatggtgcagcgcgatcgtaatcacccgagtgtgatcatctggtcgctggggaatgaatcaggccacggcgctaatcacgacgcgctgtatcgctggatcaaatctgtcgatccttcccgcccggtgcagtatgaaggcggcggagccgacaccacggccaccgatattatttgcccgatgtacgcgcgcgtggatgaagaccagcccttcccggctgtgccgaaatggtccatcaaaaaatggctttcgctacctggagagacgcgcccgctgatcctttgcgaatacgcccacgcgatgggtaacagtcttggcggtttcgctaaatactggcaggcgtttcgtcagtatccccgtttacagggcggcttcgtctgggactgggtggatcagtcgctgattaaatatgatgaaaacggcaacccgtggtcggcttacggcggtgattttggcgatacgccgaacgatcgccagttctgtatgaacggtctggtctttgccgaccgcacgccgcatccagcgctgacggaagcaaaacaccagcagcagtttttccagttccgtttatccgggcaaaccatcgaagtgaccagcgaatacctgttccgtcatagcgataacgagctcctgcactggatggtggcgctggatggtaagccgctggcaagcggtgaagtgcctctggatgtcgctccacaaggtaaacagttgattgaactgcctgaactaccgcagccggagagcgccgggcaactctggctcacagtacgcgtagtgcaaccgaacgcgaccgcatggtcagaagccgggcacatcagcgcctggcagcagtggcgtctggcggaaaacctcagtgtgacgctccccgccgcgtcccacgccatcccgcatctgaccaccagcgaaatggatttttgcatcgagctgggtaataagcgttggcaatttaaccgccagtcaggctttctttcacagatgtggattggcgataaaaaacaactgctgacgccgctgcgcgatcagttcacccgtgcaccgctggataacgacattggcgtaagtgaagcgacccgcattgaccctaacgcctgggtcgaacgctggaaggcggcgggccattaccaggccgaagcagcgttgttgcagtgcacggcagatacacttgctgatgcggtgctgattacgaccgctcacgcgtggcagcatcaggggaaaaccttatttatcagccggaaaacctaccggattgatggtagtggtcaaatggcgattaccgttgatgttgaagtggcgagcgatacaccgcatccggcgcggattggcctgaactgccagctggcgcaggtagcagagcgggtaaactggctcggattagggccgcaagaaaactatcccgaccgccttactgccgcctgttttgaccgctgggatctgccattgtcagacatgtataccccgtacgtcttcccgagcgaaaacggtctgcgctgcgggacgcgcgaattgaattatggcccacaccagtggcgcggcgacttccagttcaacatcagccgctacagtcaacagcaactgatggaaaccagccatcgccatctgctgcacgcggaagaaggcacatggctgaatatcgacggtttccatatggggattggtggcgacgactcctggagcccgtcagtatcggcggaattccagctgagcgccggtcgctaccattaccagttggtctggtgtcaaaaataa

SEQ ID NO: 5661 - DNA, 8339 bp, Artificial Sequence
  Description of Artificial Sequence: Synthetic polynucleotide
tgcataaaaactgttgtaattcattaagcattctgccgacatggaagccatcacaaacggcatgatgaacctgaatcgccagcggcatcagcaccttgtcgccttgcgtataatatttgcccatgggggtgggcgaagaactccagcatgagatccccgcgctggaggatcatccagccggcgtcccggaaaacgattccgaagcccaacctttcatagaaggcggcggtggaatcgaaatctcgtgatggcaggttgggcgtcgcttggtcggtcatttcgaaccccagagtcccgctcagaagaactcgtcaagaaggcgatagaaggcgatgcgctgcgaatcgggagcggcgataccgtaaagcacgaggaagcggtcagcccattcgccgccaagctcttcagcaatatcacgggtagccaacgctatgtcctgatagcggtccgccacacccagccggccacagtcgatgaatccagaaaagcggccattttccaccatgatattcggcaagcaggcatcgccatgggtcacgacgagatcctcgccgtcgggcatgcgcgccttgagcctggcgaacagttcggctggcgcgagcccctgatgctcttcgtccagatcatcctgatcgacaagaccggcttccatccgagtacgtgctcgctcgatgcgatgtttcgcttggtggtcgaatgggcaggtagccggatcaagcgtatgcagccgccgcattgcatcagccatgatggatactttctcggcaggagcaaggtgagatgacaggagatcctgccccggcacttcgcccaatagcagccagtcccttcccgcttcagtgacaacgtcgagcacagctgcgcaaggaacgcccgtcgtggccagccacgatagccgcgctgcctcgtcctgcagttcattcagggcaccggacaggtcggtcttgacaaaaagaaccgggcgcccctgcgctgacagccggaacacggcggcatcagagcagccgattgtctgttgtgcccagtcatagccgaatagcctctccacccaagcggccggagaacctgcgtgcaatccatcttgttcaatcatgcgaaacgatcctcatcctgtctcttgatcagatcttgatcccctgcgccatcagatccttggcggcaagaaagccatccagtttactttgcagggcttcccaaccttaccagagggcgccccagctggcaattccggttcgcttgctgtccataaaaccgcccagtctagctatcgccatgtaagcccactgcaagctacctgctttctctttgcgcttgcgttttcccttgtccagatagcccagtagctgacattcatcccaggtggcacttttcggggaaatgtgcgcgcccgcgttcctgctggcgctgggcctgtttctggcgctggacttcccgctgttccgtcagcagcttttcgcccacggccttgatgatcgcggcggccttggcctgcatatcccgattcaacggccccagggcgtccagaacgggcttcaggcgctcccgaaggtctcgggccgtctcttgggcttgatcggccttcttgcgcatctcacgcgctcctgcggcggcctgtagggcaggctcatacccctgccgaaccgcttttgtcagccggtcggccacggcttccggcgtctcaacgcgctttgagattcccagcttttcggccaatccctgcggtgcataggcgcgtggctcgaccgcttgcgggctgatggtgacgtggcccactggtggccgctccagggcctcgtagaacgcctgaatgcgcgtgtgacgtgccttgctgccctcgatgccccgttgcagccctagatcggccacagcggccgcaaacgtggtctggtcgcgggtcatctgcgctttgttgccgatgaactccttggccgacagcctgccgtcctgcgtcagcggcaccacgaacgcggtcatgtgcgggctggtttcgtcacggtggatgctggccgtcacgatgcgatccgccccgtacttgtccgccagccacttgtgcgccttctcgaagaacgccgcctgctgttcttggctggccgacttccaccattccgggctggccgtcatgacgtactcgaccgccaacacagcgtccttgcgccgcttctctggcagcaactcgcgcagtcggcccatcgcttcatcggtgctgctggccgcccagtgctcgttctctggcgtcctgctggcgtcagcgttgggcgtctcgcgctcgcggtaggcgtgcttgagactggccgccacgttgcccattttcgccagcttcttgcatcgcatgatcgcgtatgccgccatgcctgcccctcccttttggtgtccaaccggctcgacgggggcagcgcaaggcggtgcctccggcgggccactcaatgcttgagtatactcactagactttgcttcgcaaagtcgtgaccgcctacggcggctgcggcgccctacgggcttgctctccgggcttcgccctgcgcggtcgctgcgctcccttgccagcccgtggatatgtggacgatggccgcgagcggccaccggctggctcgcttcgctcggcccgtggacaaccctgctggacaagctgatggacaggctgcgcctgcccacgagcttgaccacagggattgcccaccggctacccagccttcgaccacatacccaccggctccaactgcgcggcctgcggccttgccccatcaatttttttaattttctctggggaaaagcctccggcctgcggcctgcgcgcttcgcttgccggttggacaccaagtggaaggcgggtcaaggctcgcgcagcgaccgcgcagcggcttggccttgacgcgcctggaacgacccaagcctatgcgagtgggggcagtcgaagggcgaagcccgcccgcctgccccccgagcctcacggcggcgagtgcgggggttccaagggggcagcgccaccttgggcaaggccgaaggccgcgcagtcgatcaacaagccccggaggggccactttttgccggagggggagccgcgccgaaggcgtgggggaaccccgcaggggtgcccttctttgggcaccaaagaactagatatagggcgaaatgcgaaagacttaaaaatcaacaacttaaaaaaggggggtacgcaacagctcattgcggcaccccccgcaatagctcattgcgtaggttaaagaaaatctgtaattgactgccacttttacgcaacgcataattgttgtcgcgctgccgaaaagttgcagctgattgcgcatggtgccgcaaccgtgcggcacccctaccgcatggagataagcatggccacgcagtccagagaaatcggcattcaagccaagaacaagcccggtcactgggtgcaaacggaacgcaaagcgcatgaggcgtgggccgggcttattgcgaggaaacccacggcggcaatgctgctgcatcacctcgtggcgcagatgggccaccagaacgccgtggtggtcagccagaagacactttccaagctcatcggacgttctttgcggacggtccaatacgcagtcaaggacttggtggccgagcgctggatctccgtcgtgaagctcaacggccccggcaccgtgtcggcctacgtggtcaatgaccgcgtggcgtggggccagccccgcgaccagttgcgcctgtcggtgttcagtgccgccgtggtggttgatcacgacgaccaggacgaatcgctgttggggcatggcgacctgcgccgcatcccgaccctgtatccgggcgagcagcaactaccgaccggccccggcgaggagccgcccagccagcccggcattccgggcatggaaccagacctgccagccttgaccgaaacggaggaatgggaacggcgcgggcagcagcgcctgccgatgcccgatgagccgtgttttctggacgatggcgagccgttggagccgccgacacgggtcacgctgccgcgccggtagcacttgggttgcgcagcaacccgtaagtgcgctgttccagactatcggctgtagccgcctcgccgccctataccttgtctgcctccccgcgttgcgtcgcggtgcatggagccgggccacctcgacctgaatggaagccggcggcacctcgctaacggattcaccgtttttatcaggctctgggaggcagaataaatgatcatatcgtcaattattacctccacggggagagcctgagcaaactggcctcaggcatttgagaagcacacggtcacactgcttccggtagtcaataaaccggtaaaccagcaatagacataagcggctatttaacgaccctgccctgaaccgacgaccgggtcgaatttgctttcgaatttctgccattcatccgcttattatcacttattcaggcgtagcaaccaggcgtttaagggcaccaataactgccttaaaaaaattacgccccgccctgccactcatcgcagtacggcctattggttaaaaaatgagctgatttaacaaaaatttaacgcgaattttaacaaaatattaacgcttacaatttccattcgccattcaggctgcgcaactgttgggaagggcgatcggtgcgggcctcttcgctattacgccagctggcgaaagggggatgtgctgcaaggcgattaagttgggtaacgccagggttttcccagtcacgacgttgtaaaacgacggccagtgagcgcgcgtaatacgactcactatagggcgaattggagctccaccgcggtggcggccgctctagaactagtgttagatatccattggtcacattcaaagtgttttttttgcggattatagtccgtggcaatgtttgcatcaagcgtagatagtttttcattttgtgattcgatttaaatgaaagacttagcgaaacggtttggcaccaatctacgcaataaacgccgagataaaggtgtgtcccaagaccaactagcgttgcaagcaaacattgacagaagctatgttgggcgaattgaacgaggagaagtaaacatcacactcgaaaaagcctatcaattagcgcatgtacttgggtgtgatgttagagagcttcttccgtagttatctacttattcagcagtaaagttatttttgacaccagaccaactggtaatggtagcgaccggcgctcagctggaattccgccgatactgacgggctccaggagtcgtcgccaccaatccccatatggaaaccgtcgatattcagccatgtgccttcttccgcgtgcagcagatggcgatggctggtttccatcagttgctgttgactgtagcggctgatgttgaactggaagtcgccgcgccactggtgtgggccataattcaattcgcgcgtcccgcagcgcagaccgttttcgctcgggaagacgtacggggtatacatgtctgacaatggcagatcccagcggtcaaaacaggcggcagtaaggcggtcgggatagttttcttgcggccctaatccgagccagtttacccgctctgctacctgcgccagctggcagttcaggccaatccgcgccggatgcggtgtatcgctcgccacttcaacatcaacggtaatcgccatttgaccactaccatcaatccggtaggttttccggctgataaataaggttttcccctgatgctgccacgcgtgagcggtcgtaatcagcaccgcatcagcaagtgtatctgccgtgcactgcaacaacgctgcttcggcctggtaatggcccgccgccttccagcgttcgacccaggcgttagggtcaatgcgggtcgcttcacttacgccaatgtcgttatccagcggtgcacgggtgaactgatcgcgcagcggcgtcagcagttgttttttatcgccaatccacatctgtgaaagaaagcctgactggcggttaaattgccaacgcttattacccagctcgatgcaaaaatccatttcgctggtggtcagatgcgggatggcgtgggacgcggcggggagcgtcacactgaggttttccgccagacgccactgctgccaggcgctgatgtgcccggcttctgaccatgcggtcgcgttcggttgcactacgcgtactgtgagccagagttgcccggcgctctccggctgcggtagttcaggcagttcaatcaactgtttaccttgtggagcgacatccagaggcacttcaccgcttgccagcggcttaccatccagcgccaccatccagtgcaggagctcgttatcgctatgacggaacaggtattcgctggtcacttcgatggtttgcccggataaacggaactggaaaaactgctgctggtgttttgcttccgtcagcgctggatgcggcgtgcggtcggcaaagaccagaccgttcatacagaactggcgatcgttcggcgtatcgccaaaatcaccgccgtaagccgaccacgggttgccgttttcatcatatttaatcagcgactgatccacccagtcccagacgaagccgccctgtaaacggggatactgacgaaacgcctgccagtatttagcgaaaccgccaagactgttacccatcgcgtgggcgtattcgcaaaggatcagcgggcgcgtctctccaggtagcgaaagccattttttgatggaccatttcggcacagccgggaagggctggtcttcatccacgcgcgcgtacatcgggcaaataatatcggtggccgtggtgtcggctccgccgccttcatactgcaccgggcgggaaggatcgacagatttgatccagcgatacagcgcgtcgtgattagcgccgtggcctgattcattccccagcgaccagatgatcacactcgggtgattacgatcgcgctgcaccattcgcgttacgcgttcgctcatcgccggtagccagcgcggatcatcggtcagacgattcattggcaccatgccgtgggtttcaatattggcttcatccaccacatacaggccgtagcggtcgcacagcgtgtaccacagcggatggttcggataatgcgaacagcgcacggcgttaaagttgttctgcttcatcagcaggatatcctgcaccatcgtctgctcatccatgacctgaccatgcagaggatgatgctcgtgacggttaacgcctcgaatcagcaacggcttgccgttcagcagcagcagaccattttcaatccgcacctcgcggaaaccgacatcgcaggcttctgcttcaatcagcgtgccgtcggcggtgtgcagttcaaccaccgcacgatagagattcgggatttcggcgctccacagtttcgggttttcgacgttcagacgtagtgtgacgcgatcggcataaccaccacgctcatcgataatttcaccgccgaaaggcgcggtgccgctggcgacctgcgtttcaccctgccataaagaaactgttacccgtaggtagtcacgcaactcgccgcacatctgaacttcagcctccagtacagcgcggctgaaatcatcattaaagcgagtggcaacatggaaatcgctgatttgtgtagtcggtttatgcagcaacgagacgtcacggaaaatgccgctcatccgccacatatcctgatcttccagataactgccgtcactccagcgcagcaccatcaccgcgaggcggttttctccggcgcgtaaaaatgcgctcaggtcaaattcagacggcaaacgactgtcctggccgtaaccgacccagcgcccgttgcaccacagatgaaacgccgagttaacgccatcaaaaataattcgcgtctggccttcctgtagccagctttcatcaacattaaatgtgagcgagtaacaacccgtcggattctccgtgggaacaaacggcggattgaccgtaatgggataggtcacgttggtgtagatgggcgcatcgtaaccgtgcatctgccagtttgaggggacgacgacagtatcggcctcaggaagatcgcactccagccagctttccggcaccgcttctggtgccggaaaccaggcaaagcgccattcgccattcaggctgcgcaactgttgggaagggcgatcggtgcgggcctcttcgctattacgccagctggcgaaagggggatgtgctgcaaggcgattaagttgggtaacgccagggttttcccagtcacgacgttgtaaaacgacggccagtgaatccgtaatcatggtccccctcatagctgtttcctgtgtggttatcagctactttgcagtagtaatgaggattataatcctcacttaggggtgaaacaaacagccgagtggctgtttggaaagtaacggtgttgatgtgtg

SEQ ID NO: 5662 - DNA, 5362 bp, Artificial Sequence
  Description of Artificial Sequence: Synthetic polynucleotide
tcaactagagtaaatgaactcttccaatctatttatggtagaagctctcgaatatcgcactgaaggacacttgctatctggtaggctttttctagtgtgatattcacttcacctcgttctatcctgcctacgtagctacgatctatatctgcagccaaagccaacttatcctgtgatattcctttgtcttttcgcatagaacgaacgttgtagccaaacttttttgctaagtctctcatttcaaaagtacattaaaaagaaagactatctattcttgaagagaacttttccacggactataatccgcatttatttttctatgttcaaatctactgtcgagagttgctaagctgctgccaccgctgagcaataactagcataaccccttggggcctctaaacgggtcttgaggggttttttgctgaaaggaggaactatatccggattggcgaatgggacgcgccctgtagcggcgcattaagcgcggcgggtgtggtggttacgcgcagcgtgaccgctacacttgccagcgccctagcgcccgctcctttcgctttcttcccttcctttctcgccacgttcgccggctttccccgtcaagctctaaatcgggggctccctttagggttccgatttagtgctttacggcacctcgaccccaaaaaacttgattagggtgatggttcacgtagtgggccatcgccctgatagacggtttttcgccctttgacgttggagtccacgttctttaatagtggactcttgttccaaactggaacaacactcaaccctatctcggtctattcttttgatttataagggattttgccgatttcggcctattggttaaaaaatgagctgatttaacaaaaatttaacgcgaattttaacaaaatattaacgtttacaatttctggcggcacgatggcatgagattatcaaaaaggatcttcacctagatccttttaaattaaaaatgaagttttaaatcaatctaaagtatatatgagtaaacttggtctgacagttaccaatgcttaatcagtgaggcacctatctcagcgatctgtctatttcgttcatccatagttgcctgactccccgtcgtgtagataactacgatacgggagggcttaccatctggccccagtgctgcaatgataccgcgagacccacgctcaccggctccagatttatcagcaataaaccagccagccggaagggccgagcgcagaagtggtcctgcaactttatccgcctccatccagtctattaattgttgccgggaagctagagtaagtagttcgccagttaatagtttgcgcaacgttgttgccattgctacaggcatcgtggtgtcacgctcgtcgtttggtatggcttcattcagctccggttcccaacgatcaaggcgagttacatgatcccccatgttgtgcaaaaaagcggttagctccttcggtcctccgatcgttgtcagaagtaagttggccgcagtgttatcactcatggttatggcagcactgcataattctcttactgtcatgccatccgtaagatgcttttctgtgactggtgagtactcaaccaagtcattctgagaatagtgtatgcggcgaccgagttgctcttgcccggcgtcaatacgggataataccgcgccacatagcagaactttaaaagtgctcatcattggaaaacgttcttcggggcgaaaactctcaaggatcttaccgctgttgagatccagttcgatgtaacccactcgtgcacccaactgatcttcagcatcttttactttcaccagcgtttctgggtgagcaaaaacaggaaggcaaaatgccgcaaaaaagggaataagggcgacacggaaatgttgaatactcatactcttcctttttcaatcatgattgaagcatttatcagggttattgtctcatgagcggatacatatttgaatgtatttagaaaaataaacaaataggtcatgaccaaaatcccttaacgtgagttttcgttccactgagcgtcagaccccgtagaaaagatcaaaggatcttcttgagatcctttttttctgcgcgtaatctgctgcttgcaaacaaaaaaaccaccgctaccagcggtggtttgtttgccggatcaagagctaccaactctttttccgaaggtaactggcttcagcagagcgcagataccaaatactgtccttctagtgtagccgtagttaggccaccacttcaagaactctgtagcaccgcctacatacctcgctctgctaatcctgttaccagtggctgctgccagtggcgataagtcgtgtcttaccgggttggactcaagacgatagttaccggataaggcgcagcggtcgggctgaacggggggttcgtgcacacagcccagcttggagcgaacgacctacaccgaactgagatacctacagcgtgagctatgagaaagcgccacgcttcccgaagggagaaaggcggacaggtatccggtaagcggcagggtcggaacaggagagcgcacgagggagcttccagggggaaacgcctggtatctttatagtcctgtcgggtttcgccacctctgacttgagcgtcgatttttgtgatgctcgtcaggggggcggagcctatggaaaaacgccagcaacgcggcctttttacggttcctggccttttgctggccttttgctcacatgttctttcctgcgttatcccctgattctgtggataaccgtattaccgcctttgagtgagctgataccgctcgccgcagccgaacgaccgagcgcagcgagtcagtgagcgaggaagcggaagagcgcctgatgcggtattttctccttacgcatctgtgcggtatttcacaccgcatatatggtgcactctcagtacaatctgctctgatgccgcatagttaagccagtatacactccgctatcgctacgtgactgggtcatggctgcgccccgacacccgccaacacccgctgacgcgccctgacgggcttgtctgctcccggcatccgcttacagacaagctgtgaccgtctccgggagctgcatgtgtcagaggttttcaccgtcatcaccgaaacgcgcgaggcagctgcggtaaagctcatcagcgtggtcgtgaagcgattcacagatgtctgcctgttcatccgcgtccagctcgttgagtttctccagaagcgttaatgtctggcttctgataaagcgggccatgttaagggcggttttttcctgtttggtcactgatgcctccgtgtaagggggatttctgttcatgggggtaatgataccgatgaaacgagagaggatgctcacgatacgggttactgatgatgaacatgcccggttactggaacgttgtgagggtaaacaactggcggtatggatgcggcgggaccagagaaaaatcactcagggtcaatgccagcgcttcgttaatacagatgtaggtgttccacagggtagccagcagcatcctgcgatgcagatccggaacataatggtgcagggcgctgacttccgcgtttccagactttacgaaacacggaaaccgaagaccattcatgttgttgctcaggtcgcagacgttttgcagcagcagtcgcttcacgttcgctcgcgtatcggtgattcattctgctaaccagtaaggcaaccccgccagcctagccgggtcctcaacgacaggagcacgatcatgctagtcatgccccgcgcccaccggaaggagctgactgggttgaaggctctcaagggcatcggtcgagatcccggtgcctaatgagtgagctaacttacattaattgcgttgcgctcactgcccgctttccagtcgggaaacctgtcgtgccagctgcattaatgaatcggccaacgcgcggggagaggcggtttgcgtattgggcgccagggtggtttttcttttcaccagtgagacgggcaacagctgattgcccttcaccgcctggccctgagagagttgcagcaagcggtccacgctggtttgccccagcaggcgaaaatcctgtttgatggtggttaacggcgggatataacatgagctgtcttcggtatcgtcgtatcccactaccgagatgtccgcaccaacgcgcagcccggactcggtaatggcgcgcattgcgcccagcgccatctgatcgttggcaaccagcatcgcagtgggaacgatgccctcattcagcatttgcatggtttgttgaaaaccggacatggcactccagtcgccttcccgttccgctatcggctgaatttgattgcgagtgagatatttatgccagccagccagacgcagacgcgccgagacagaacttaatgggcccgctaacagcgcgatttgctggtgacccaatgcgaccagatgctccacgcccagtcgcgtaccgtcttcatgggagaaaataatactgttgatgggtgtctggtcagagacatcaagaaataacgccggaacattagtgcaggcagcttccacagcaatggcatcctggtcatccagcggatagttaatgatcagcccactgacgcgttgcgcgagaagattgtgcaccgccgctttacaggcttcgacgccgcttcgttctaccatcgacaccaccacgctggcacccagttgatcggcgcgagatttaatcgccgcgacaatttgcgacggcgcgtgcagggccagactggaggtggcaacgccaatcagcaacgactgtttgcccgccagttgttgtgccacgcggttgggaatgtaattcagctccgccatcgccgcttccactttttcccgcgttttcgcagaaacgtggctggcctggttcaccacgcgggaaacggtctgataagagacaccggcatactctgcgacatcgtataacgttactggtttcacattcaccaccctgaattgactctcttccgggcgctatcatgccataccgcgaaaggttttgcgccattcgatggtgtccgggatctcgacgctctcccttatgcgactcctgcattaggaagcagcccagtagtaggttgaggccgttgagcaccgccgccgcaaggaatggtgcatgcaaggagatggcgcccaacagtcccccggccacggggcctgccaccatacccacgccgaaacaagcgctcatgagcccgaagtggcgagcccgatcttccccatcggtgatgtcggcgatataggcgccagcaaccgcacctgtggcgccggtgatgccggccacgatgcgtccggcgtagaggatcgagatcgatctcgatcccgcgaaattaatacgactcactataggggaattgtgagcggataacaattcccct

SEQ ID NO: 5663 - DNA, 5416 bp, Artificial Sequence
  Description of Artificial Sequence: Synthetic polynucleotide
gctgctgccaccgctgagcaataactagcataaccccttggggcctctaaacgggtcttgaggggttttttgctgaaaggaggaactatatccggattggcgaatgggacgcgccctgtagcggcgcattaagcgcggcgggtgtggtggttacgcgcagcgtgaccgctacacttgccagcgccctagcgcccgctcctttcgctttcttcccttcctttctcgccacgttcgccggctttccccgtcaagctctaaatcgggggctccctttagggttccgatttagtgctttacggcacctcgaccccaaaaaacttgattagggtgatggttcacgtagtgggccatcgccctgatagacggtttttcgccctttgacgttggagtccacgttctttaatagtggactcttgttccaaactggaacaacactcaaccctatctcggtctattcttttgatttataagggattttgccgatttcggcctattggttaaaaaatgagctgatttaacaaaaatttaacgcgaattttaacaaaatattaacgtttacaatttctggcggcacgatggcatgagattatcaaaaaggatcttcacctagatccttttaaattaaaaatgaagttttaaatcaatctaaagtatatatgagtaaacttggtctgacagttaccaatgcttaatcagtgaggcacctatctcagcgatctgtctatttcgttcatccatagttgcctgactccccgtcgtgtagataactacgatacgggagggcttaccatctggccccagtgctgcaatgataccgcgagacccacgctcaccggctccagatttatcagcaataaaccagccagccggaagggccgagcgcagaagtggtcctgcaactttatccgcctccatccagtctattaattgttgccgggaagctagagtaagtagttcgccagttaatagtttgcgcaacgttgttgccattgctacaggcatcgtggtgtcacgctcgtcgtttggtatggcttcattcagctccggttcccaacgatcaaggcgagttacatgatcccccatgttgtgcaaaaaagcggttagctccttcggtcctccgatcgttgtcagaagtaagttggccgcagtgttatcactcatggttatggcagcactgcataattctcttactgtcatgccatccgtaagatgcttttctgtgactggtgagtactcaaccaagtcattctgagaatagtgtatgcggcgaccgagttgctcttgcccggcgtcaatacgggataataccgcgccacatagcagaactttaaaagtgctcatcattggaaaacgttcttcggggcgaaaactctcaaggatcttaccgctgttgagatccagttcgatgtaacccactcgtgcacccaactgatcttcagcatcttttactttcaccagcgtttctgggtgagcaaaaacaggaaggcaaaatgccgcaaaaaagggaataagggcgacacggaaatgttgaatactcatactcttcctttttcaatcatgattgaagcatttatcagggttattgtctcatgagcggatacatatttgaatgtatttagaaaaataaacaaataggtcatgaccaaaatcccttaacgtgagttttcgttccactgagcgtcagaccccgtagaaaagatcaaaggatcttcttgagatcctttttttctgcgcgtaatctgctgcttgcaaacaaaaaaaccaccgctaccagcggtggtttgtttgccggatcaagagctaccaactctttttccgaaggtaactggcttcagcagagcgcagataccaaatactgtccttctagtgtagccgtagttaggccaccacttcaagaactctgtagcaccgcctacatacctcgctctgctaatcctgttaccagtggctgctgccagtggcgataagtcgtgtcttaccgggttggactcaagacgatagttaccggataaggcgcagcggtcgggctgaacggggggttcgtgcacacagcccagcttggagcgaacgacctacaccgaactgagatacctacagcgtgagctatgagaaagcgccacgcttcccgaagggagaaaggcggacaggtatccggtaagcggcagggtcggaacaggagagcgcacgagggagcttccagggggaaacgcctggtatctttatagtcctgtcgggtttcgccacctctgacttgagcgtcgatttttgtgatgctcgtcaggggggcggagcctatggaaaaacgccagcaacgcggcctttttacggttcctggccttttgctggccttttgctcacatgttctttcctgcgttatcccctgattctgtggataaccgtattaccgcctttgagtgagctgataccgctcgccgcagccgaacgaccgagcgcagcgagtcagtgagcgaggaagcggaagagcgcctgatgcggtattttctccttacgcatctgtgcggtatttcacaccgcatatatggtgcactctcagtacaatctgctctgatgccgcatagttaagccagtatacactccgctatcgctacgtgactgggtcatggctgcgccccgacacccgccaacacccgctgacgcgccctgacgggcttgtctgctcccggcatccgcttacagacaagctgtgaccgtctccgggagctgcatgtgtcagaggttttcaccgtcatcaccgaaacgcgcgaggcagctgcggtaaagctcatcagcgtggtcgtgaagcgattcacagatgtctgcctgttcatccgcgtccagctcgttgagtttctccagaagcgttaatgtctggcttctgataaagcgggccatgttaagggcggttttttcctgtttggtcactgatgcctccgtgtaagggggatttctgttcatgggggtaatgataccgatgaaacgagagaggatgctcacgatacgggttactgatgatgaacatgcccggttactggaacgttgtgagggtaaacaactggcggtatggatgcggcgggaccagagaaaaatcactcagggtcaatgccagcgcttcgttaatacagatgtaggtgttccacagggtagccagcagcatcctgcgatgcagatccggaacataatggtgcagggcgctgacttccgcgtttccagactttacgaaacacggaaaccgaagaccattcatgttgttgctcaggtcgcagacgttttgcagcagcagtcgcttcacgttcgctcgcgtatcggtgattcattctgctaaccagtaaggcaaccccgccagcctagccgggtcctcaacgacaggagcacgatcatgctagtcatgccccgcgcccaccggaaggagctgactgggttgaaggctctcaagggcatcggtcgagatcccggtgcctaatgagtgagctaacttacattaattgcgttgcgctcactgcccgctttccagtcgggaaacctgtcgtgccagctgcattaatgaatcggccaacgcgcggggagaggcggtttgcgtattgggcgccagggtggtttttcttttcaccagtgagacgggcaacagctgattgcccttcaccgcctggccctgagagagttgcagcaagcggtccacgctggtttgccccagcaggcgaaaatcctgtttgatggtggttaacggcgggatataacatgagctgtcttcggtatcgtcgtatcccactaccgagatgtccgcaccaacgcgcagcccggactcggtaatggcgcgcattgcgcccagcgccatctgatcgttggcaaccagcatcgcagtgggaacgatgccctcattcagcatttgcatggtttgttgaaaaccggacatggcactccagtcgccttcccgttccgctatcggctgaatttgattgcgagtgagatatttatgccagccagccagacgcagacgcgccgagacagaacttaatgggcccgctaacagcgcgatttgctggtgacccaatgcgaccagatgctccacgcccagtcgcgtaccgtcttcatgggagaaaataatactgttgatgggtgtctggtcagagacatcaagaaataacgccggaacattagtgcaggcagcttccacagcaatggcatcctggtcatccagcggatagttaatgatcagcccactgacgcgttgcgcgagaagattgtgcaccgccgctttacaggcttcgacgccgcttcgttctaccatcgacaccaccacgctggcacccagttgatcggcgcgagatttaatcgccgcgacaatttgcgacggcgcgtgcagggccagactggaggtggcaacgccaatcagcaacgactgtttgcccgccagttgttgtgccacgcggttgggaatgtaattcagctccgccatcgccgcttccactttttcccgcgttttcgcagaaacgtggctggcctggttcaccacgcgggaaacggtctgataagagacaccggcatactctgcgacatcgtataacgttactggtttcacattcaccaccctgaattgactctcttccgggcgctatcatgccataccgcgaaaggttttgcgccattcgatggtgtccgggatctcgacgctctcccttatgcgactcctgcattaggaagcagcccagtagtaggttgaggccgttgagcaccgccgccgcaaggaatggtgcatgcaaggagatggcgcccaacagtcccccggccacggggcctgccaccatacccacgccgaaacaagcgctcatgagcccgaagtggcgagcccgatcttccccatcggtgatgtcggcgatataggcgccagcaaccgcacctgtggcgccggtgatgccggccacgatgcgtccggcgtagaggatcgagatcgatctcgatcccgcgaaattaatacgactcactataggggaattgtgagcggataacaattcccctttaacttctcagcttttccaacaacaccgccttctcttcatcactcatcttatcaattgcgcacgctaactcagcgctcaattcgctcctacagaaaaagtagtttagcggcacatctaactcttcagccatgcgctcaagcgtaccaatatcaggtacatgcctgcctttctcgtaatgattcatacgaccgctagcagaactttgttccataccaattttcacccctaaatctttttgggtgatcttggcttttttacgcgcagctttgagcctcgctgggatggggttgtctttttgcacttacacatttcttttcaacctttagataacttagattgtctaagttttactgatttttgtatacttagcaatcctaagtttttattgcctgtaagagtca

SEQ ID NO: 5664 - DNA, 5325 bp, Artificial Sequence
  Description of Artificial Sequence: Synthetic polynucleotide
gctgctgccaccgctgagcaataactagcataaccccttggggcctctaaacgggtcttgaggggttttttgctgaaaggaggaactatatccggattggcgaatgggacgcgccctgtagcggcgcattaagcgcggcgggtgtggtggttacgcgcagcgtgaccgctacacttgccagcgccctagcgcccgctcctttcgctttcttcccttcctttctcgccacgttcgccggctttccccgtcaagctctaaatcgggggctccctttagggttccgatttagtgctttacggcacctcgaccccaaaaaacttgattagggtgatggttcacgtagtgggccatcgccctgatagacggtttttcgccctttgacgttggagtccacgttctttaatagtggactcttgttccaaactggaacaacactcaaccctatctcggtctattcttttgatttataagggattttgccgatttcggcctattggttaaaaaatgagctgatttaacaaaaatttaacgcgaattttaacaaaatattaacgtttacaatttctggcggcacgatggcatgagattatcaaaaaggatcttcacctagatccttttaaattaaaaatgaagttttaaatcaatctaaagtatatatgagtaaacttggtctgacagttaccaatgcttaatcagtgaggcacctatctcagcgatctgtctatttcgttcatccatagttgcctgactccccgtcgtgtagataactacgatacgggagggcttaccatctggccccagtgctgcaatgataccgcgagacccacgctcaccggctccagatttatcagcaataaaccagccagccggaagggccgagcgcagaagtggtcctgcaactttatccgcctccatccagtctattaattgttgccgggaagctagagtaagtagttcgccagttaatagtttgcgcaacgttgttgccattgctacaggcatcgtggtgtcacgctcgtcgtttggtatggcttcattcagctccggttcccaacgatcaaggcgagttacatgatcccccatgttgtgcaaaaaagcggttagctccttcggtcctccgatcgttgtcagaagtaagttggccgcagtgttatcactcatggttatggcagcactgcataattctcttactgtcatgccatccgtaagatgcttttctgtgactggtgagtactcaaccaagtcattctgagaatagtgtatgcggcgaccgagttgctcttgcccggcgtcaatacgggataataccgcgccacatagcagaactttaaaagtgctcatcattggaaaacgttcttcggggcgaaaactctcaaggatcttaccgctgttgagatccagttcgatgtaacccactcgtgcacccaactgatcttcagcatcttttactttcaccagcgtttctgggtgagcaaaaacaggaaggcaaaatgccgcaaaaaagggaataagggcgacacggaaatgttgaatactcatactcttcctttttcaatcatgattgaagcatttatcagggttattgtctcatgagcggatacatatttgaatgtatttagaaaaataaacaaataggtcatgaccaaaatcccttaacgtgagttttcgttccactgagcgtcagaccccgtagaaaagatcaaaggatcttcttgagatcctttttttctgcgcgtaatctgctgcttgcaaacaaaaaaaccaccgctaccagcggtggtttgtttgccggatcaagagctaccaactctttttccgaaggtaactggcttcagcagagcgcagataccaaatactgtccttctagtgtagccgtagttaggccaccacttcaagaactctgtagcaccgcctacatacctcgctctgctaatcctgttaccagtggctgctgccagtggcgataagtcgtgtcttaccgggttggactcaagacgatagttaccggataaggcgcagcggtcgggctgaacggggggttcgtgcacacagcccagcttggagcgaacgacctacaccgaactgagatacctacagcgtgagctatgagaaagcgccacgcttcccgaagggagaaaggcggacaggtatccggtaagcggcagggtcggaacaggagagcgcacgagggagcttccagggggaaacgcctggtatctttatagtcctgtcgggtttcgccacctctgacttgagcgtcgatttttgtgatgctcgtcaggggggcggagcctatggaaaaacgccagcaacgcggcctttttacggttcctggccttttgctggccttttgctcacatgttctttcctgcgttatcccctgattctgtggataaccgtattaccgcctttgagtgagctgataccgctcgccgcagccgaacgaccgagcgcagcgagtcagtgagcgaggaagcggaagagcgcctgatgcggtattttctccttacgcatctgtgcggtatttcacaccgcatatatggtgcactctcagtacaatctgctctgatgccgcatagttaagccagtatacactccgctatcgctacgtgactgggtcatggctgcgccccgacacccgccaacacccgctgacgcgccctgacgggcttgtctgctcccggcatccgcttacagacaagctgtgaccgtctccgggagctgcatgtgtcagaggttttcaccgtcatcaccgaaacgcgcgaggcagctgcggtaaagctcatcagcgtggtcgtgaagcgattcacagatgtctgcctgttcatccgcgtccagctcgttgagtttctccagaagcgttaatgtctggcttctgataaagcgggccatgttaagggcggttttttcctgtttggtcactgatgcctccgtgtaagggggatttctgttcatgggggtaatgataccgatgaaacgagagaggatgctcacgatacgggttactgatgatgaacatgcccggttactggaacgttgtgagggtaaacaactggcggtatggatgcggcgggaccagagaaaaatcactcagggtcaatgccagcgcttcgttaatacagatgtaggtgttccacagggtagccagcagcatcctgcgatgcagatccggaacataatggtgcagggcgctgacttccgcgtttccagactttacgaaacacggaaaccgaagaccattcatgttgttgctcaggtcgcagacgttttgcagcagcagtcgcttcacgttcgctcgcgtatcggtgattcattctgctaaccagtaaggcaaccccgccagcctagccgggtcctcaacgacaggagcacgatcatgctagtcatgccccgcgcccaccggaaggagctgactgggttgaaggctctcaagggcatcggtcgagatcccggtgcctaatgagtgagctaacttacattaattgcgttgcgctcactgcccgctttccagtcgggaaacctgtcgtgccagctgcattaatgaatcggccaacgcgcggggagaggcggtttgcgtattgggcgccagggtggtttttcttttcaccagtgagacgggcaacagctgattgcccttcaccgcctggccctgagagagttgcagcaagcggtccacgctggtttgccccagcaggcgaaaatcctgtttgatggtggttaacggcgggatataacatgagctgtcttcggtatcgtcgtatcccactaccgagatgtccgcaccaacgcgcagcccggactcggtaatggcgcgcattgcgcccagcgccatctgatcgttggcaaccagcatcgcagtgggaacgatgccctcattcagcatttgcatggtttgttgaaaaccggacatggcactccagtcgccttcccgttccgctatcggctgaatttgattgcgagtgagatatttatgccagccagccagacgcagacgcgccgagacagaacttaatgggcccgctaacagcgcgatttgctggtgacccaatgcgaccagatgctccacgcccagtcgcgtaccgtcttcatgggagaaaataatactgttgatgggtgtctggtcagagacatcaagaaataacgccggaacattagtgcaggcagcttccacagcaatggcatcctggtcatccagcggatagttaatgatcagcccactgacgcgttgcgcgagaagattgtgcaccgccgctttacaggcttcgacgccgcttcgttctaccatcgacaccaccacgctggcacccagttgatcggcgcgagatttaatcgccgcgacaatttgcgacggcgcgtgcagggccagactggaggtggcaacgccaatcagcaacgactgtttgcccgccagttgttgtgccacgcggttgggaatgtaattcagctccgccatcgccgcttccactttttcccgcgttttcgcagaaacgtggctggcctggttcaccacgcgggaaacggtctgataagagacaccggcatactctgcgacatcgtataacgttactggtttcacattcaccaccctgaattgactctcttccgggcgctatcatgccataccgcgaaaggttttgcgccattcgatggtgtccgggatctcgacgctctcccttatgcgactcctgcattaggaagcagcccagtagtaggttgaggccgttgagcaccgccgccgcaaggaatggtgcatgcaaggagatggcgcccaacagtcccccggccacggggcctgccaccatacccacgccgaaacaagcgctcatgagcccgaagtggcgagcccgatcttccccatcggtgatgtcggcgatataggcgccagcaaccgcacctgtggcgccggtgatgccggccacgatgcgtccggcgtagaggatcgagatcgatctcgatcccgcgaaattaatacgactcactataggggaattgtgagcggataacaattcccctttacggaagaagctctctaacatcacacccaagtacatgcgctaattgataggctttttcgagtgtgatgtttacttctcctcgttcaattcgcccaacatagcttctgtcaatgtttgcttgcaacgctagttggtcttgggacacacctttatctcggcgtttattgcgtagattggtgccaaaccgtttcgctaagtctttcatttaaatcgaatcacaaaatgaaaaactatctacgcttgatgcaaacattgccacggactataatccgcaaaaaaaacactttgaatgtgaccaatggatatctaa

SEQ ID NO: 5665 - DNA, 1423 bp, Artificial Sequence
  Description of Artificial Sequence: Synthetic polynucleotide
ggccagcggccgcacattcactgaactttgacgtaccggcacatgtcgtctaaaccataagttgacatatctaaagcataagttgacatgatcttgcatcataagctgacatagcctaaacctgtagtaaagtaacaacaggttggtggtgtgtttttaaatgatatcggatcctagtaagccacgttgtgtctcaaaatctctgatgttacattgcacaagataaaaatatatcatcatgaacaataaaactgtctgcttacataaacagtaatacaaggggtgttatgagccatattcaacgggaaacgtcttgctcgaggccgcgattaaattccaacatggatgctgatttatatgggtataaatgggctcgcgataatgtcgggcaatcaggtgcgacaatctatcgattgtatgggaagcccgatgcgccagagttgtttctgaaacatggcaaaggtagcgttgccaatgatgttacagatgagatggtcagactaaactggctgacggaatttatgcctcttccgaccatcaagcattttatccgtactcctgatgatgcatggttactcaccactgcgatccccgggaaaacagcattccaggtattagaagaatatcctgattcaggtgaaaatattgttgatgcgctggcagtgttcctgcgccggttgcattcgattcctgtttgtaattgtccttttaacagcgatcgcgtatttcgtctcgctcaggcgcaatcacgaatgaataacggtttggttgatgcgagtgattttgatgacgagcgtaatggctggcctgttgaacaagtctggaaagaaatgcataagcttttgccattctcaccggattcagtcgtcactcatggtgatttctcacttgataaccttatttttgacgaggggaaattaataggttgtattgatgttggacgagtcggaatcgcagaccgataccaggatcttgccatcctatggaactgcctcggtgagttttctccttcattacagaaacggctttttcaaaaatatggtattgataatcctgatatgaataaattgcagtttcatttgatgctcgatgagtttttctaatcagaattggttaattggttgtaacactggcagagcattacgctgacttgacgggacggcggctttgttgaataaatgatgcagttaagtgcctgctgtgtatctcgaacagattgctgaagtggtaaaataacaacaccgcaggggcagggcgtaggggttgatgtcactctatgtcagcttatgggtaatttttatgtcaacttatgggttataaaacactcgtaagtcactgatttatggttgtgcgttatgtcaacttatggtttagacgacagcacaacctcacccagtccttcttcggggggcggccgcggttc

SEQ ID NO: 5666 - DNA, 1890 bp, Artificial Sequence
  Description of Artificial Sequence: Synthetic polynucleotide
gaattgtgagcggataacaatttcaaggaggtaacagctatgtatcgccgtcatctgaaacacagtcgcgtcaagaacttatttaagttcgtgagcgctaaaatgaataccgtctttacggtagagtctgcgcttgaatttgatacgtgttttcatctggaatactcaccatccgtgaaattttacgaagcgcagccggagggtttttattacgagttcgctggtcgtcaatgcccatatacccctgactttcgtttggtggatcagaacgactcggtttcgtttcttgaaatcaagccctctgacaaggtggctgatccagattttctgcatcgctttcccctgaagcagcagcgcgccattgaacttagttcaccattaaagcttgttactgaaaaacaaatccgcattgatcctatcctggggaacttaaagttacttcaccgctattctggctttcaatcctttactcctttgcatatgcaattattgggtctggtgcaaaaattgggtcgcgtatcactgctgcgtttaagtgactccatcgacgcaccacctgaggaggtattagcaagcgcgttatccttaatcgctcgtggaattatgcagagtgacttaacggtacagaagattggcatcagttcgttcgtgtgggctggcggtcattcaggcattgaccatggataagcataacggcggtttatttgaagacgaattcgtaattccccaaccatccacatctacctcacccattgacgccatccaagctgtccttccggctactgttgatagctttccttatgttttaaaagttgaggcgctgcatcgtcgcgattacattctttgggtggagaagaatcttgccgggggttggacagagaagaaccttactcccttgttggcagatgcagcgttggttttacctccccccacgcctaattggcgtactctggcacgctggcgtaaaatctatattcaacacggtcgtaaacttgtcagtttaatcccaaaacatcaggcaaaaggtaacgctcgcagtcgccttccacccagtgatgagctgtttttcgagcaagcagtacatcgttacttagtaggagagcagccttcaattgcgtcggcattccagttgtactccgactcaatccgtatcgagaatcttggtgtggtggagaatcctattaaaactatcagctacatggctttctacaaccgcattaagaaattaccggcgtatcaagtaatgaagagccgtaagggctcctatattgccgacgtcgagttcaaagccattgcctctcacaagccaccgagtcgtattatggagcgcgtggagatcgatcacacaccattggatttacttttattggatgatgacttgcttgtgccacttgggcgtccttcccttacattattgattgatgcctattcgcattgcgtggtcggctttaatcttaatttcaatcagccttcatacgagtccgttcgtaatgcgctgttatcgagcatctccaaaaaagattatgttaaaaacaaatacccatccatcgaacacgaatggccatgctacggtaagccagagacccttgtcgtggataacggggtcgagttttggtccgcttcccttgcacaatcgtgccttgaactgggaattaacattcagtacaatcctgttcgcaaaccttggttaaagccgatgatcgagcgtatgttcgggattattaaccgtaagcttctggaacccattccgggcaaaaccttcagcaacatccaggagaagggtgattatgatccccaaaaagacgctgttatgcgctttagcacatttcttgaaatctttcatcactgggtcattgacgtgtatcactacgaacctgacagccgttaccg

SEQ ID NO: 5667 - DNA, 1732 bp, Artificial Sequence
  Description of Artificial Sequence: Synthetic polynucleotide
actacgaacctgacagccgttaccgttacattccgattatctcctggcaacacggaaataaagacgccccacctgcaccaatcattggtgatgatttgacaaagctggaagtgattttaagtctttcgttacattgtacccatcgtcgtggcggtatccagcgctaccatttgcgctatgattctgacgagttagcatcatatcgtatgaactatccagatcagacgcgtggcaaacgtaaagttctggtcaaacttaatcctcgtgatatctcttatgtgtacgtcttcttggaggatttagggtcatacattcgtgtcccttgtatcgacccgattggttacaccaagggtttatctctgcaagaacaccagatcaacgtcaagttgcatcgcgattttattaatgagcagatggatgtggtgagtctgagcaaggcacgtatttacctgaatgatcgcattaaaaacgagcttatcgaagtgcgtcgcaacatccgtcagcgcaacgtgaaaggggtaaataagattgccaagtatcgtaatgttggatctcacgcagaaacatccattgttcatgagctgaaccatcctgcgacgaatgaggtcatctctaagatggagagtgccagccagcccgaacactgtgacgattgggataatttcacttctggcttggagccctactgatggacctttcgtgtcacgacgcagacaaattgcgctcgtttattgaatgttatgtagaaaccccgcttcttcgcgctatccaggaagacttcgatcgtcttcgtttcaacaagcaatttgcaggtgagccgcagtgtatgttgcttactggtgacaccggcaccggcaagagctcccttatccgtcattacgcagccaaacatcctgaacaggtacgtcacggtttcattcacaagccattacttgtttcacgcattccgtctcgtcccacccttgaatctaccatggtggagttgcttaaagatttaggtcaattcggcagttctgaccgtatccataaaagttccgccgaaagtttaaccgaggctttaattaaatgtcttaaacgctgtgagaccgagctgattatcatcgacgagtttcaagagcttattgaaaataagacccgcgagaagcgcaaccaaattgcgaatcgcttgaagtatatttcggaaacagctaagattccgattgttttagtaggtatgccctgggcgaccaagattgcagaagagccacaatggagctctcgcttgttgattcgtcgttcaatcccctattttaagttatccgacgatcgtgaaaattttatccgccttattatgggattggcgaatcgcatgccctttgagacccaagcacgccttgagaccaaacacactatctacgctttgtttgccgcgtgctacgggagccttcgtgcactgaaacaactgctggacgaatcagttaagcaagcgttggccgcccatgccgagacgctgaagcatgagcacattgccgtggcttatgcattattttacccggatcaggtcaatccgtttttacagccgattgacgagatcaaggcttgtgaggttaagcaatatagtcgttacgaaatcgatgccgccgggaaagaggaagtcctgaacccattacaatttactgataaaatcccgatttctcagctgttaaaaaaacgataatgactcgaggcctcgtgatacgcctatttttatagg

SEQ ID NO: 5668 - DNA, 1262 bp, Artificial Sequence
  Description of Artificial Sequence: Synthetic polynucleotide
ttttgggctagcaggaggaattcaccatgcaccttcttgtacgcccggaaccgtttgcggacgaggctttggaatcatacttcttacgtttgtcacaggagaatggatttgagcgctaccgcattttctccggctccgtacaagattggcttcatacaacagatcacgctgccgctggcgccttccctcttgagctgagtcgtttaaatatctttcacgcctctcgcagttctggtttgcgcgtccgtgctcttcaattggttgaccgtcttaccgatggcgccccctttcgcctgcttcagctggcattatgtcattcggcaattagcttcgggaatcattacaaggctgttcatcgcagtggcgtggatatcccattatctttcattcgtgtccaccaaattccttgctgccccgattgccttcgcgagagcgcttatgtacgccaatgttggcattttaaaccgtacgtgggatgccatcgccacgggggccgcttaatttattcatgtccagcatgtggggagtctttgaactatttagcctcagaatcgattaatcattgccagtgcgggttcgacttacgtacggcctcaactgttcccgcacagcccgatgaaattcagttgtcagccttggcctacggatgctcgttcgagtcttccaatccgcttcttgcgatcggctctttatcggcccgtttcggagctttatactggtatcagcagcgttacctgtcggatcacgaggctgtgcgtgacgatcgtgctttgaccaaggcgattggtcactttaccgcttggcccgatgctttctggcgtgaattgcaacagatggtagacgacgccttagtacgccaaactaagccgttgaaccatactgactttgtagacgtctttggctcggttgttgctgattgtcgtcagattcccatgcgcaacacgggccaaaatttcattttaaaaaacttgatcggatttcttacagatttggtggcacgccaccctcagtgtcgcgtagcaaatgtcggcgatcttctgctgtcggcagttgacgcggccacacttctttctacttcggtcgagcaggtacgtcgtctgcatcacgaggggttcttacccttgtctatccgccctgctagtcgcaataccgtctctccgcatcgcgcagtcttccatttacgccacgtcgtcgaattgcgtcaagcacgcatgcaatcacatcatgatcacagttcaacctatctacctgcatggtgacca

SEQ ID NO: 5669 - DNA, 1883 bp, Artificial Sequence
  Description of Artificial Sequence: Synthetic polynucleotide
aacctatctacctgcatggtgaccatcatgcacatcgaagagttgttggacatcgaagaccatggggagcgtgatcgccaattgcgccgttacctggcgccatactctgcagagatcggggtcgatggggccgaaaagatggctttagtggtccttttgaatcttactctgaagcgcgaccgtgttgagagcttatgtgacgagggtctggctcgtcagttactgtctgatgaagggcatatcacaaactgcctgcacacggttcgttggttgcacacacacaacttaaagtacccggatgctcgtgtctcaggcgagcgtttaattattaacgctccgccattgatcccgggtgtaatctcatcggcaggcttaccgatgcgcatggggtgggcccatgactcaagcgatatcaacttagccaagctgttcggaacaagttttcgctatcgcgatgactcaacaaatttagcacttcagcttgtggcgcgtagcaaaacttgggaacaagccttaattggactgggactgactcagcagcaattggatatctggtgtcaacttttggcatctaatcttgaaaataacacatttcccactgttgtgtcccccttttccaaacaggtgcgcttcttgtatcagggtaactattgcgtggttacgcccgtcgtctctcacgcccttcttgcgcaattgcaaaatgtggttcacgaaaagaagttacagtgtacgtacattcaccatgaccaccccgcctcagttggcagtttagtgggggccttgggtggtaaagtcgctgtattagattacccgcccccagtttccccggataaagctcgtagctttagccaggcccgcaaacatcgcttggcgaatggtcagagcctgtttgatcgttccgtgtttaacgaccatgtattcatcgacgcgttaaaacatgtgattagtcgccccggattaactcgcaaacaacaacgtcaattacgcctttccgcattgcgttaccttcgtcgccagttggccatttggttaggccccattattgagtggcgtgatgagattgtttctagcggtcgtggagaaccaggaaatctgccatcaggaggattagagcttgagctgattacccaaccaaagaagatgttacctgagctgatgcttcaggttgcagggcgttttcatttagagcttcagaaccacagtgcaggacgccgcttcgccttccatccggcgttaatggctcctatcaaatctcaaattctttggctgcttcgccaattggccgacgatgaagaaaaggatgaacctcacccccccaccagttgctattatttacacctttcagggttgactgtgtatgacgcttcagcattggcgaacccgtacctgtgtggaatcccatctttgagcgctctggctggtttctgtcatgactatgagcgtcgcttacagtccttaatcgggcagagcgtatatttccgtgggttggcgtggtacttggggcgctactcccttgttaccggcaagcatttacccgaaccgtcgaaatcagctgaccctaagtctgtttcagcgattcgccgcccaggcttgttggatgggcgttactgcgacctgggaatggaccttattatcgaagttcacattcccaccggcggatcgttgccgttcacgacatgtctggacttattgcgtgtagccctgcctgcacgtttcgctggcggctgccttcatcccccgtccttgtacgaggaatataattggtgcactgtctaccaagacaagagtacgctgtttacagtcctgtcacgtcttccgcgctacggctgttggatttaccccagtgatgcagacttgcgcagctttgaagagctgtcagaagc

SEQ ID NO: 5670 - DNA, 1965 bp, Artificial Sequence
  Description of Artificial Sequence: Synthetic polynucleotide
gcagctttgaagagctgtcagaagcgttagccttggaccgtcgcttacgtccggttgctacaggctttgtgtttttagaagaacccgtggaacgtgcaggatcgatcgaaggccaacacgtttatgccgaaagtgcgatcggaactgccttgtgcattaatccagtggagatgcgtctggctggtaaaaagcgcttcttcggcgcaggtttttggcagttgaacgacgctaaaggtgccatcctgatgaatggttcagcaaacacggggtaaatgcatggaattatgtactcacttgtcatattcccgcagcctgtcacccggaaaggccgtcttcttctacaaaacggccgagtcagacttcgtccccttacgtatcgaggttgctaagatctccggacaaaaatgtggctatacagaaggttttgatgcaaatttgaagccaaaaaacattgagcgctacgagttggcgtacagtaacccccaaactatcgaggcttgttacgtcccgccgaacgtagatgaactgtattgccgtttctcgcttcgcgtcgaagctaattccatgcgtccctatgtttgtagtaatccagatgtacttcgtgtgatgattggcctggcgcaggcctaccagcgtctgggaggctacaacgaattagctcgccgttatagcgcgaatgtattacgtggaatttggttatggcgcaaccaatatactcaggggaccaaaattgaaatcaaaacatcattgggttctacctatcacatcccagacgctcgccgcctttcttggtcgggcgactggcctgaactggaacaaaagcaacttgagcagttgacctcagagatggcgaaagctctttcgcagcctgacatcttttggtttgcggacgttaccgcgtcactgaagacgggtttttgccaggaaatctttccttcacaaaaatttacagagcgtcctgatgatcactccgttgcctcccgccagcttgccaccgtggaatgttcagatggacaactggcagcctgcatcaacccgcagaagatcggcgcggctttgcaaaagatcgatgactggtgggcgaatgacgcggatctgcctctgcgtgtccacgaatacggggctaatcatgaagcattaacagcgttacgccaccctgcaacgggtcaagatttctaccaccttcttactaaggccgaacaatttgtgacggtgcttgaatcctctgaaggagggggcgttgagctgccgggagaggtacactatttgatggcagtgttggtgaagggtggattgtttcagaaagggaaggggagatgaccgaaaatcgctactttttcgccatccgttatttgagtgacgatgtggactgtggtcttttagctggacgttgcatttcgattcttcatgggtttcgccaagcgcaccctggcattcaaatcggtgtcgctttccccgaatggagtgatcgcgacctgggtcgtagcatcgcttttgtttcgacgaacaagagtctgttagaacgtttccgtgagcgttcctactttcaggtcatgcaggcggacaatttcttcgcgctgtctttggtactggaagtccccgatacttgtcagaacgttcgctttatccgtaatcaaaacttagccaagttgttcgtcggcgaacgccgtcgtcgtttggcgcgtgccaagcgccgcgctaaggcccgcggtgaagccttccaaccccatatgccggatgagacaaaagtagttggtgtcttccactccgtattcatgcaatcagcaagctctggtcagtcttacatcctgcatattcagaaacatcgttatgagcgttcggaggattcgggttactcgagttatggcttagcaagtaacgacttatatacaggttatgtcccagatcttggtgcaatcttctctacgctgttttaagcttggctgttttggcggatgagagaag

SEQ ID NO: 5671 - DNA, 550 bp, Artificial Sequence
  Description of Artificial Sequence: Synthetic polynucleotide
gaattcgagctcggtacccggggatgtgaactgccgtataggcagccaagaaatgagacccacgatttgtaataacagagtgtcttgtatttttaaagaaagtctatttaatacaagtgattatattaattaacggtaagcatcagcgggtgacaaaacgagcatgcttactaataaaatgttaacctctgaggaagaattgtgaaactatcactaatggtagctatatcgaagaatggagttatcgggaatggccctgatattccatggagtgccaaaggtgaacagctcctgtttaaagctattacctataaccaatggctgttggttggacgcaagacttttgaatcaatgggagcattacccaaccgaaagtatgcggtcgtaacacgttcaagttttacatctgacaatgagaacgtattgatctttccatcaattaaagatgctttaaccaacctaaagaaaataacggatcatgtcattgtttcaggtggtggggagatatacaaaagcctgatcgatcaagtagatacactacatatatcta

SEQ ID NO: 5672 - DNA, 404 bp, Artificial Sequence
  Description of Artificial Sequence: Synthetic polynucleotide
caagtagatacactacatatatctacaatagacatcgagccggaaggtgatgtttactttcctgaaatccccagcaattttaggccagtttttacccaagacttcgcctctaacataaattatagttaccaaatctggcaaaagggttaacaagtggcagcaacggattcgcaaacctgtcacgccttttgtgccaaaagccgcgccaggtttgcgatccgctgtgccaggcgttaggcgtcatatgaagatttcggtgatccctgagcaggtctcgtgaactgccgtataggcagccaagattaggactggaagaaatcatccaagttggggactattttctgccgtaaaggcagatattattatgtagcccagtctttgcgagagtagggaactgccaggca

SEQ ID NO: 5673 - DNA, 472 bp, Artificial Sequence
  Description of Artificial Sequence: Synthetic polynucleotide
gaggcgcggccgcaattaatgtgagttagctcactcattaggcaccccaggctttacactttatgcttccggctcgtatgttgtgtggaattgtgagcggataacaatttcaaggaggtaacagctatgactaatccattacccattcgccttaaagccgctcgcaaggctactggactgactcaacaacagttaggtatccgcttgggaatggaacaatcaaccgcatctgcccgcatgaaccagtacgagaaagggaaacatgcgcctgactatcaaaccatgcaacgcatcgcccaggagctgggctatcccgttgcgtacttctattgtgatgacgagcttctggcggaactgatctgcatgatggccaaactttccgaggagaaacagcgcgaattgcttcaacagttgagtgtaactgaatatgcagagtcgcgtgactcggcagagtgataagcggccgcgggcg

SEQ ID NO: 5674 - DNA, 962 bp, Artificial Sequence
  Description of Artificial Sequence: Synthetic polynucleotide
cgccagggttttcccagtcacgacctcgaggctctggcaggatgtttcgtaatttccgctgagcattaaaaactaagtattgcttagtacacttgttcgtataagactaagagaatcttagctacctgatcctcagctagcagagaccccatgacaaacccattacccatcagaaggcctcataagaacaccgaaactaaatattacttagtttttaggtgtagcacatatccttggtatcaccattcgagcagacacacttttagctcagcagcacaccgaaaaactcaacaatgatgcgactcgagggttcgccaatgctgaagtgactcttacaggcaataaaaacttaggattgctaagtatacaaaaatcagtaaaacttagacaatctaagttatctaaaggttgaaaagaaatgtgtaagtgcaaaaagacaaccccatcccagcgaggcctcacatgccaccactaaaacttagagtatctaagttttagtattgccgttaatcccgataattcaaattctatggagccaaattgtgaactttaataaactaactattgcgtggttacgccctcgagtcctgtgtgaaattgttatccgctgcctgaactggaacaaaagcaagcttttaacttctcagcttttccaacaacaccgccttctcttcatcactcatcttatcaattgcgcacgctaactcagcgctcaattcgctcctacagaaaaagtagtttagcggcacatctaactcttcagccatgcgctcaagcgtaccaatatcaggtacatgcctgcctttctcgtaatgattcatacgaccgctagcagaactttgttccataccaattttcacccctaaatctttttgggtgatcttggcttttttacgcgcagctttgagcctcgccgggatggggttatccttctgcatatgcaataaaccggtaaaccagca

SEQ ID NO: 5675 - DNA, 938 bp, Artificial Sequence
  Description of Artificial Sequence: Synthetic polynucleotide
cgccagggttttcccagtcacgacctcgaggctctggcaggatgtttcgtaatttccgctgagcattaaaaactaagtattgcttagtacacttgttcgtataagaagaagagaatcttagctacctgatcctcagctagcagagaccccatgacaaacccattacccatcagaaggcctcataagaacaccgaaactaaatattacttcttttttaggtgtagcacatatccttggtatcaccattcgagcagacacacttttagctcagcagcacaccgaaaaactcaacaatgatgcgactcgagggttcgccaatgctgaagcacacatcaacaccgttactttccaaacagccactcggctgtttgtttcacccctaagtgaggattataatcctcattactactgcaaagtagctgataaccacacaggaaacagctatgaggccttcctgtgtgaaattgttatccgcttaatacgactcactatagggctcgagttagatatccattggtcacattcaaagtgttttttttgcggattatagtccgtggcaatgtttgcatcaagcgtagatagtttttcattttgtgattcgatttaaatgaggccttaatcgatgagaccctatagtgtcacctaaatagctgctggtttaccggtttattgggtctcactagtctagagtcacacaggactactatatgaaagacttagcgaaacggtttggcaccaatctacgcaataaacgccgagataaaggtgtgtcccaagaccaactagcgttgcaagcaaacattgacagaagctatgttgggcgaattgaacgaggagaagtaaacatcacactcgaaaaagcctatcaattagcgcatgtacttgggtgtgatgttagagagcttcttccgtaagcttgcttttgttccagttcaggc

SEQ ID NO: 5676 - protein, 538 aa, Escherichia coli
MVRLATFNDNVQVVHIGHLFRNSGHKEWRIFVWFNPMQERKWTRFTHLPLLSRAKVVNSTTKQINKADRVIEFEASDLQRAKIIDFPNLSSFASVRNKDGAQSSFIYEAETPYSKTRYHIPQLELARSLFLINSYFCRSCLSSTALQQEFDVQYEVERDHLEIRILPSSSFPKGALEQSAVVQLLVWLFSDQDVMDSYESIFRHYQQNREIKNGVESWCFSFDPPPMQGWKLHVKGRSSNEDKDYLVEEIVGLEINAMLPSTTAISHASFQEKEAGDGSTQHIAVSTESVVDDEHLQLDDEETANIDTDTRVIEAEPTWISFSRPSRIEKSRRARKSSQTILEKEEATTSENSNLVSTDEPHLGGVLAAADVGGKQDATNYNSIFANRFAAFDELLSILKTKFACRVLFEETLVLPKVGRSRLHLCKDGSPRVIKAVGVQRNGSEFVLLEVDASDGVKMLSTKVLSGVDSETWRNDFEKIRRGVVKSSLNWPNSLFDQLYGQDGHRGVNHPKGLGELQVSREDMEGWAERVVREQFTH

SEQ ID NO: 5677 - protein, 215 aa, Artificial Sequence
  Description of Artificial Sequence: Synthetic polypeptide
MYRRHLKHSRVKNLFKFVSAKMNTVFTVESALEFDTCFHLEYSPSVKFYEAQPEGFYYEFAGRQCPYTPDFRLVDQNDSVSFLEIKPSDKVADPDFLHRFPLKQQRAIELSSPLKLVTEKQIRIDPILGNLKLLHRYSGFQSFTPLHMQLLGLVQKLGRVSLLRLSDSIDAPPEEVLASALSLIARGIMQSDLTVQKIGISSFVWAGGHSGIDHG

SEQ ID NO: 5678 - protein, 624 aa, Artificial Sequence
  Description of Artificial Sequence: Synthetic polypeptide
MDKHNGGLFEDEFVIPQPSTSTSPIDAIQAVLPATVDSFPYVLKVEALHRRDYILWVEKNLAGGWTEKNLTPLLADAALVLPPPTPNWRTLARWRKIYIQHGRKLVSLIPKHQAKGNARSRLPPSDELFFEQAVHRYLVGEQPSIASAFQLYSDSIRIENLGVVENPIKTISYMAFYNRIKKLPAYQVMKSRKGSYIADVEFKAIASHKPPSRIMERVEIDHTPLDLLLLDDDLLVPLGRPSLTLLIDAYSHCVVGFNLNFNQPSYESVRNALLSSISKKDYVKNKYPSIEHEWPCYGKPETLVVDNGVEFWSASLAQSCLELGINIQYNPVRKPWLKPMIERMFGIINRKLLEPIPGKTFSNIQEKGDYDPQKDAVMRFSTFLEIFHHWVIDVYHYEPDSRYRYIPIISWQHGNKDAPPAPIIGDDLTKLEVILSLSLHCTHRRGGIQRYHLRYDSDELASYRMNYPDQTRGKRKVLVKLNPRDISYVYVFLEDLGSYIRVPCIDPIGYTKGLSLQEHQINVKLHRDFINEQMDVVSLSKARIYLNDRIKNELIEVRRNIRQRNVKGVNKIAKYRNVGSHAETSIVHELNHPATNEVISKMESASQPEHCDDWDNFTSGLEPY

SEQ ID NO: 5679 - protein, 624 aa, Artificial Sequence
  Description of Artificial Sequence: Synthetic polypeptide
MDKHNGGLFEDEFVIPQPSTSTSPIDAIQAVLPATVDSFPYVLKVEALHRRDYILWVEKNLAGGWTEKNLTPLLADAALVLPPPTPNWRTLARWRKIYIQHGRKLVSLIPKHQAKGNARSRLPPSDELFFEQAVHRYLVGEQPSIASAFQLYSDSIRIENLGVVENSIKTISYMAFYNRIKKLPAYQVMKSRKGSYIADVEFKAIASHKPPSRIMERVEIDHTPLDLLLLDDDLLVPLGRPSLTLLIDAYSHCVVGFNLNFNQPSYESVRNALLSSISKKDYVKNKYPSIEHEWPCYGKPETLVVDNGVEFWSASLAQSCLELGINIQYNPVRKPWLKPMIERMFGIINRKLLEPIPGKTFSNIQEKGDYDPQKDAVMRFSTFLEIFHHWVIDVYHYEPDSRYRYIPIISWQHGNKDAPPAPIIGDDLTKLEVILSLSLHCTHRRGGIQRYHLRYDSDELASYRMNYPDQTRGKRKVLVKLNPRDISYVYVFLEDLGSYIRVPCIDPIGYTKGLSLQEHQINVKLHRDFINEQMDVVSLSKARIYLNDRIKNELIEVRRNIRQRNVKGVNKIAKYRNVGSHAETSIVHELNHPATNEVISKMESASQPEHCDDWDNFTSGLEPY

SEQ ID NO: 5680 - protein, 335 aa, Artificial Sequence
  Description of Artificial Sequence: Synthetic polypeptide
MDLSCHDADKLRSFIECYVETPLLRAIQEDFDRLRFNKQFAGEPQCMLLTGDTGTGKSSLIRHYAAKHPEQVRHGFIHKPLLVSRIPSRPTLESTMVELLKDLGQFGSSDRIHKSSAESLTEALIKCLKRCETELIIIDEFQELIENKTREKRNQIANRLKYISETAKIPIVLVGMPWATKIAEEPQWSSRLLIRRSIPYFKLSDDRENFIRLIMGLANRMPFETQARLETKHTIYALFAACYGSLRALKQLLDESVKQALAAHAETLKHEHIAVAYALFYPDQVNPFLQPIDEIKACEVKQYSRYEIDAAGKEEVLNPLQFTDKIPISQLLKKR

SEQ ID NO: 5681 - protein, 335 aa, Artificial Sequence
  Description of Artificial Sequence: Synthetic polypeptide
MDLSCHDADKLRSFIECYVETPLLRAIQEDFDRLRFNKQFAGEPQCMLLTGDTGTGKSSLIRHYAAKHPEQVRHGFIHKPLLVSRIPSRPTLESTMVELLKDLGQFGSSDRIHKSSAESLTEALIKCLKRCETELIIIDAFQELIENKTREKRNQIANRLKYISETAKIPIVLVGMPWATKIAEEPQWSSRLLIRRSIPYFKLSDDRENFIRLIMGLANRMPFETQARLETKHTIYALFAACYGSLRALKQLLDESVKQALAAHAETLKHEHIAVAYALFYPDQVNPFLQPIDEIKACEVKQYSRYEIDAAGKEEVLNPLQFTDKIPISQLLKKR

SEQ ID NO: 5682 - protein, 335 aa, Artificial Sequence
  Description of Artificial Sequence: Synthetic polypeptide
MDLSCHDADKLRSFIECYVETPLLRAIQEDFDRLRFNKQFAGEPQCMLLTGDTGTGKSSLIRHYAAKHPEQVRHGFIHKPLLVSRIPSRPTLESTMVELLKDLGQFGSSDRIHKSSAESLTEALIKCLKRCETELIIIDQFQELIENKTREKRNQIANRLKYISETAKIPIVLVGMPWATKIAEEPQWSSRLLIRRSIPYFKLSDDRENFIRLIMGLANRMPFETQARLETKHTIYALFAACYGSLRALKQLLDESVKQALAAHAETLKHEHIAVAYALFYPDQVNPFLQPIDEIKACEVKQYSRYEIDAAGKEEVLNPLQFTDKIPISQLLKKR

SEQ ID NO: 5683 - protein, 109 aa, Aeromonas hydrophila
MTNPLPIRLKAARKATGLTQQQLGIRLGMEQSTASARMNQYEKGKHAPDYQTMQRIAQELGYPVAYFYCDDELLAELICMMAKLSEEKQRELLQQLSVTEYAESRDSAE

SEQ ID NO: 5684 - DNA, 26 bp, Artificial Sequence
  Description of Artificial Sequence: Synthetic oligonucleotide
tggtctcaccataggctgctgccacc

SEQ ID NO: 5685 - DNA, 35 bp, Artificial Sequence
  Description of Artificial Sequence: Synthetic oligonucleotide
ccgggtgaactgccgtataggcagccaagaaaagg

SEQ ID NO: 5686 - DNA, 55 bp, Artificial Sequence
  Description of Artificial Sequence: Synthetic oligonucleotide
ccaacttggatgatttcttccagtccttttcttggctgcctatacggcagttcac

SEQ ID NO: 5687 - DNA, 57 bp, Artificial Sequence
  Description of Artificial Sequence: Synthetic oligonucleotide
actggaagaaatcatccaagttggggactgtgaactgccgtataggcagccaagatt

SEQ ID NO: 5688 - DNA, 37 bp, Artificial Sequence
  Description of Artificial Sequence: Synthetic oligonucleotide
atggaatcttggctgcctatacggcagttcacagtcc

SEQ ID NO: 5689 - DNA, 35 bp, Artificial Sequence
  Description of Artificial Sequence: Synthetic oligonucleotide
ccgggtgaactgccgtataggcagccaagattagg

SEQ ID NO: 5690 - DNA, 55 bp, Artificial Sequence
  Description of Artificial Sequence: Synthetic oligonucleotide
ccaacttggatgatttcttccagtcctaatcttggctgcctatacggcagttcac

SEQ ID NO: 5691 - DNA, 57 bp, Artificial Sequence
  Description of Artificial Sequence: Synthetic oligonucleotide
actggaagaaatcatccaagttggggactattttctgccgtaaaggcagatattatt

SEQ ID NO: 5692 - DNA, 37 bp, Artificial Sequence
  Description of Artificial Sequence: Synthetic oligonucleotide
atggaataatatctgcctttacggcagaaaatagtcc

SEQ ID NO: 5693 - DNA, 35 bp, Artificial Sequence
  Description of Artificial Sequence: Synthetic oligonucleotide
ccgggtgaactgccgagtaggtagctgataacaag

SEQ ID NO: 5694 - DNA, 55 bp, Artificial Sequence
  Description of Artificial Sequence: Synthetic oligonucleotide
ttgaactcggataaacgttgtacgcttgttatcagctacctactcggcagttcac

SEQ ID NO: 5695 - DNA, 57 bp, Artificial Sequence
  Description of Artificial Sequence: Synthetic oligonucleotide
cgtacaacgtttatccgagttcaagagcagtgaactgccgagtaggtagctgataac

SEQ ID NO: 5696 - DNA, 37 bp, Artificial Sequence
  Description of Artificial Sequence: Synthetic oligonucleotide
atgggttatcagctacctactcggcagttcactgctc

SEQ ID NO: 5697 - DNA, 35 bp, Artificial Sequence
  Description of Artificial Sequence: Synthetic oligonucleotide
ccgggtgaactgccgagtaggtagctgataacaaa

SEQ ID NO: 5698 - DNA, 55 bp, Artificial Sequence
  Description of Artificial Sequence: Synthetic oligonucleotide
ttgtactcgaatgaaggtggttcgtttgttatcagctacctactcggcagttcac

SEQ ID NO: 5699 - DNA, 57 bp, Artificial Sequence
  Description of Artificial Sequence: Synthetic oligonucleotide
cgaaccaccttcattcgagtacaagagcagtgaactgccgagtaggtagctgataac

SEQ ID NO: 5700 - DNA, 35 bp, Artificial Sequence
  Description of Artificial Sequence: Synthetic oligonucleotide
ccggtcattactactgcaaagtagctgataacaag

SEQ ID NO: 5701 - DNA, 55 bp, Artificial Sequence
  Description of Artificial Sequence: Synthetic oligonucleotide
ttgaactcggataaacgttgtacgcttgttatcagctactttgcagtagtaatga

SEQ ID NO: 5702 - DNA, 57 bp, Artificial Sequence
  Description of Artificial Sequence: Synthetic oligonucleotide
cgtacaacgtttatccgagttcaagagcactttactgctgaataagtagataactac

SEQ ID NO: 5703 - DNA, 37 bp, Artificial Sequence
  Description of Artificial Sequence: Synthetic oligonucleotide
atgggtagttatctacttattcagcagtaaagtgctc

SEQ ID NO: 5704 - DNA, 35 bp, Artificial Sequence
  Description of Artificial Sequence: Synthetic oligonucleotide
ccggtcattactactgcaaagtagctgataacaaa

SEQ ID NO: 5705 - DNA, 55 bp, Artificial Sequence
  Description of Artificial Sequence: Synthetic oligonucleotide
ttgtactcgaatgaaggtggttcgtttgttatcagctactttgcagtagtaatga

SEQ ID NO: 5706 - DNA, 57 bp, Artificial Sequence
  Description of Artificial Sequence: Synthetic oligonucleotide
cgaaccaccttcattcgagtacaagagcactttactgctgaataagtagataactac

SEQ ID NO: 5707 - DNA, 41 bp, Artificial Sequence
  Description of Artificial Sequence: Synthetic oligonucleotide
gagcggataacaattccccttcaactagagtaaatgaactc

SEQ ID NO: 5708 - DNA, 40 bp, Artificial Sequence
  Description of Artificial Sequence: Synthetic oligonucleotide
tgctcagcggtggcagcagcttagcaactctcgacagtag

SEQ ID NO: 5709 - DNA, 42 bp, Artificial Sequence
  Description of Artificial Sequence: Synthetic oligonucleotide
gagcggataacaattcccctttaacttctcagcttttccaac

SEQ ID NO: 5710 - DNA, 32 bp, Artificial Sequence
  Description of Artificial Sequence: Synthetic oligonucleotide
cccagcgaggctcaaagctgcgcgtaaaaaag

SEQ ID NO: 5711 - DNA, 28 bp, Artificial Sequence
  Description of Artificial Sequence: Synthetic oligonucleotide
cagctttgagcctcgctgggatggggtt

SEQ ID NO: 5712 - DNA, 52 bp, Artificial Sequence
  Description of Artificial Sequence: Synthetic oligonucleotide
tgctcagcggtggcagcagctgactcttacaggcaataaaaacttaggattg

SEQ ID NO: 5713 - DNA, 40 bp, Artificial Sequence
  Description of Artificial Sequence: Synthetic oligonucleotide
cggccgctctagaactagtgttagcaactctcgacagtag

SEQ ID NO: 5714 - DNA, 31 bp, Artificial Sequence
  Description of Artificial Sequence: Synthetic oligonucleotide
tcaaaaataatcaactagagtaaatgaactc

SEQ ID NO: 5715 - DNA, 29 bp, Artificial Sequence
  Description of Artificial Sequence: Synthetic oligonucleotide
ctctagttgattatttttgacaccagacc

SEQ ID NO: 5716 - DNA, 48 bp, Artificial Sequence
  Description of Artificial Sequence: Synthetic oligonucleotide
attacaacagtttttatgcaagtttaaaaaatcaatactattaccatc

SEQ ID NO: 5717 - DNA, 52 bp, Artificial Sequence
  Description of Artificial Sequence: Synthetic oligonucleotide
cggccgctctagaactagtgtgactcttacaggcaataaaaacttaggattg

SEQ ID NO: 5718 - DNA, 33 bp, Artificial Sequence
  Description of Artificial Sequence: Synthetic oligonucleotide
ttaataaactagagtttgtagaaacgcaaaaag

SEQ ID NO: 5719 - DNA, 34 bp, Artificial Sequence
  Description of Artificial Sequence: Synthetic oligonucleotide
tacaaactctagtttattaaagttcacaatttgg

SEQ ID NO: 5720 - DNA, 39 bp, Artificial Sequence
  Description of Artificial Sequence: Synthetic oligonucleotide
attacaacagtttttatgcattatttttgacaccagacc

SEQ ID NO: 5721 - DNA, 39 bp, Artificial Sequence
  Description of Artificial Sequence: Synthetic oligonucleotide
ctgaaccaagcgtacaacgtttatccgagttcaagagca

SEQ ID NO: 5722 - DNA, 39 bp, Artificial Sequence
  Description of Artificial Sequence: Synthetic oligonucleotide
ggctgctcttgaactcggataaacgttgtacgcttggtt

SEQ ID NO: 5723 - DNA, 43 bp, Artificial Sequence
  Description of Artificial Sequence: Synthetic oligonucleotide
cggccgctctagaactagtgttagatatccattggtcacattc

SEQ ID NO: 5724 - DNA, 33 bp, Artificial Sequence
  Description of Artificial Sequence: Synthetic oligonucleotide
ctaagtctttcatttaaatcgaatcacaaaatg

SEQ ID NO: 5725 - DNA, 28 bp, Artificial Sequence
  Description of Artificial Sequence: Synthetic oligonucleotide
gatttaaatgaaagacttagcgaaacgg

SEQ ID NO: 5726 - DNA, 45 bp, Artificial Sequence
  Description of Artificial Sequence: Synthetic oligonucleotide
ctttactgctgaataagtagataactacggaagaagctctctaac

SEQ ID NO: 5727 - DNA, 44 bp, Artificial Sequence
  Description of Artificial Sequence: Synthetic oligonucleotide
gttatctacttattcagcagtaaagttatttttgacaccagacc

SEQ ID NO: 5728 - DNA, 39 bp, Artificial Sequence
  Description of Artificial Sequence: Synthetic oligonucleotide
attacaacagtttttatgcacacacatcaacaccgttac

SEQ ID NO: 5729 - DNA, 41 bp, Artificial Sequence
  Description of Artificial Sequence: Synthetic oligonucleotide
gagcggataacaattcccctttacggaagaagctctctaac

SEQ ID NO: 5730 - DNA, 43 bp, Artificial Sequence
  Description of Artificial Sequence: Synthetic oligonucleotide
tgctcagcggtggcagcagcttagatatccattggtcacattc

SEQ ID NO: 5731 - RNA, 32 nt, Artificial Sequence
  Description of Artificial Sequence: Synthetic oligonucleotide
aaacgaaccaccuucauucgaguacaagagca

SEQ ID NO: 5732 - DNA, 91 bp, Vibrio cholerae
acgaagcgtacaacgtttatccgagttcaagagcaagagaacaacgtttacgggcgtgagtaagcgcatagattctctgacatttgttgat

SEQ ID NO: 5733 - protein, 20 aa, Vibrio cholerae
TKRTTFIRVQEQENNVYGRE

SEQ ID NO: 5734 - RNA, 31 nt, Artificial Sequence
  Description of Artificial Sequence: Synthetic oligonucleotide
cgaaaaaccgacucggaccucuacauuuaaa

SEQ ID NO: 5735 - DNA, 91 bp, Vibrio parahaemolyticus
aaatgtttgagtgtttccttactttctactcgtcaccagtttctctataatgggaagcaaaaaatcgacttggaccgctgcaattaaaacc

SEQ ID NO: 5736 - protein, 22 aa, Vibrio parahaemolyticus
MSSGQRDITLRFLAEPGDVNFG

SEQ ID NO: 5737 - RNA, 32 nt, Artificial Sequence
  Description of Artificial Sequence: Synthetic oligonucleotide
aggacaggaagaaaacacccaaguuggggucu

SEQ ID NO: 5738 - DNA, 91 bp, Aeromonas salmonicida
gtcaggaccggaaggtagcagccaaggcgggggactcgagtgccgggatgtggctggtggggccaccacctgtttctgcaattctgtcgtt

SEQ ID NO: 5739 - RNA, 32 nt, Artificial Sequence
  Description of Artificial Sequence: Synthetic oligonucleotide
aaaaacaaucgauucgauguuuaaguuaaugu

SEQ ID NO: 5740 - DNA, 91 bp, Pseudoalteromonas arctica
accaaaaagaaccgttttgatgtctatgtaaaagcggcaatggtttaagcatcaaaacaaatcggcgttatatccctagaatttatgtcgc

SEQ ID NO: 5741 - protein, 15 aa, Pseudoalteromonas arctica
TKKNRFDVYVKAAMV

SEQ ID NO: 5742 - RNA, 20 nt, Artificial Sequence
  Description of Artificial Sequence: Synthetic oligonucleotide
gugaacugccguauaggcag

SEQ ID NO: 5743 - RNA, 60 nt, Artificial Sequence
  Description of Artificial Sequence: Synthetic oligonucleotide
  modified_base (9)..(40): a, c, u, g, unknown or other
ccaagaaannnnnnnnnnnnnnnnnnnnnnnnnnnnnnnngugaacugccguauaggcag

SEQ ID NO: 5744 - RNA, 60 nt, Artificial Sequence
  Description of Artificial Sequence: Synthetic oligonucleotide
  modified_base (9)..(40): a, c, u, g, unknown or other
ccaagauunnnnnnnnnnnnnnnnnnnnnnnnnnnnnnnnauuuucugccguaaaggcag

SEQ ID NO: 5745 - RNA, 60 nt, Artificial Sequence
  Description of Artificial Sequence: Synthetic oligonucleotide
  modified_base (9)..(40): a, c, u, g, unknown or other
ccaagaaannnnnnnnnnnnnnnnnnnnnnnnnnnnnnnnauuaacugccguauaggcag

SEQ ID NO: 5746 - RNA, 60 nt, Artificial Sequence
  Description of Artificial Sequence: Synthetic oligonucleotide
  modified_base (9)..(40): a, c, u, g, unknown or other
ccaagauunnnnnnnnnnnnnnnnnnnnnnnnnnnnnnnnguguucugccguaaaggcag

SEQ ID NO: 5747 - RNA, 60 nt, Artificial Sequence
  Description of Artificial Sequence: Synthetic oligonucleotide
  modified_base (9)..(40): a, c, u, g, unknown or other
cugauaacnnnnnnnnnnnnnnnnnnnnnnnnnnnnnnnngugaacugccgaguagguag

SEQ ID NO: 5748 - RNA, 60 nt, Artificial Sequence
  Description of Artificial Sequence: Synthetic oligonucleotide
  modified_base (9)..(40): a, c, u, g, unknown or other
cugauaacnnnnnnnnnnnnnnnnnnnnnnnnnnnnnnnncuuaacugccgaguagguag

SEQ ID NO: 5749 - RNA, 60 nt, Artificial Sequence
  Description of Artificial Sequence: Synthetic oligonucleotide
  modified_base (9)..(40): a, c, u, g, unknown or other
cugauaacnnnnnnnnnnnnnnnnnnnnnnnnnnnnnnnnguguacugcugaauaaguag

SEQ ID NO: 5750 - RNA, 60 nt, Artificial Sequence
  Description of Artificial Sequence: Synthetic oligonucleotide
  modified_base (9)..(40): a, c, u, g, unknown or other
cugauaacnnnnnnnnnnnnnnnnnnnnnnnnnnnnnnnncuuuacugcugaauaaguag

SEQ ID NO: 5751 - DNA, 21 bp, Artificial Sequence
  Description of Artificial Sequence: Synthetic oligonucleotide
gcacatgtcgtctaaaccata

SEQ ID NO: 5752 - DNA, 21 bp, Artificial Sequence
  Description of Artificial Sequence: Synthetic oligonucleotide
tatggtttagacgacagcaca

SEQ ID NO: 5753 - DNA, 28 bp, Aeromonas hydrophila
atattctgccgtagaggcagatattatt

SEQ ID NO: 5754 - DNA, 32 bp, Aeromonas hydrophila
acaaaacgccgacaggcctgttcatccaggct

SEQ ID NO: 5755 - RNA, 32 nt, Artificial Sequence
  Description of Artificial Sequence: Synthetic oligonucleotide
acaaaacgccgacaggccuguucauccaggcu

SEQ ID NO: 5756 - DNA, 36 bp, Artificial Sequence
  Description of Artificial Sequence: Synthetic oligonucleotide
accacaaaacgccgacaggcctgttcatccaagcgc

SEQ ID NO: 5757 - RNA, 32 nt, Artificial Sequence
  Description of Artificial Sequence: Synthetic oligonucleotide
aggacuggaagaaaucauccaaguuggggacu

SEQ ID NO: 5758 - DNA, 36 bp, Aeromonas hydrophila
gtcaggaccggaaggtagcagccaaggcgggggact

SEQ ID NO: 5759 - RNA, 32 nt, Artificial Sequence
  Description of Artificial Sequence: Synthetic oligonucleotide
cggaaggggagggcacccugcuuauugauaau

SEQ ID NO: 5760 - DNA, 36 bp, Artificial Sequence
  Description of Artificial Sequence: Synthetic oligonucleotide
acccggaaggggagggcaccctgcttattgataatc

SEQ ID NO: 5761 - DNA, 86 bp, Artificial Sequence
  Description of Artificial Sequence: Synthetic oligonucleotide
acccggaaggggagggcaccctgcttattgataatcaggaggccccttgcgctcgttcgccagccaggacagaaatgcctcgactt

SEQ ID NO: 5762 - DNA, 91 bp, Artificial Sequence
  Description of Artificial Sequence: Synthetic oligonucleotide
acccggaaggggagggcaccctgcttattgataatcaggaggccccttgcgctcgttcgccagccaggacagaaatgcctcgatgtcgtct

SEQ ID NO: 5763 - DNA, 16 bp, Artificial Sequence
  Description of Artificial Sequence: Synthetic oligonucleotide
agacgacactcgactt

SEQ ID NO: 5764 - DNA, 36 bp, Artificial Sequence
  Description of Artificial Sequence: Synthetic oligonucleotide
acccggaggggagggcaccctgcttattgataatca

SEQ ID NO: 5765 - DNA, 14 bp, Artificial Sequence
  Description of Artificial Sequence: Synthetic oligonucleotide
cctcgatgtcgtct

SEQ ID NO: 5766 - DNA, 88 bp, Artificial Sequence
  Description of Artificial Sequence: Synthetic oligonucleotide
  modified_base (29)..(60): a, c, t, g, unknown or other
gttcactgccgtgtaggcagctaagaaannnnnnnnnnnnnnnnnnnnnnnnnnnnnnnngttcactgccgtgtaggcagctaagaaa

SEQ ID NO: 5767 - DNA, 88 bp, Artificial Sequence
  Description of Artificial Sequence: Synthetic oligonucleotide
  modified_base (29)..(60): a, c, t, g, unknown or other
gtgaactgccgtataggcagccaagaaannnnnnnnnnnnnnnnnnnnnnnnnnnnnnnngtgaactgccgtataggcagccaagatt

SEQ ID NO: 5768 - DNA, 88 bp, Artificial Sequence
  Description of Artificial Sequence: Synthetic oligonucleotide
  modified_base (29)..(60): a, c, t, g, unknown or other
gtgaactgccgtataggcagccaagattnnnnnnnnnnnnnnnnnnnnnnnnnnnnnnnnattttctgccgtaaaggcagatattatt

SEQ ID NO: 5769 - DNA, 88 bp, Artificial Sequence
  Description of Artificial Sequence: Synthetic oligonucleotide
  modified_base (29)..(60): a, c, t, g, unknown or other
gtgaactgccgagtaggtagctgataacnnnnnnnnnnnnnnnnnnnnnnnnnnnnnnnngtgaactgccgagtaggtagctgataac

SEQ ID NO: 5770 - DNA, 88 bp, Artificial Sequence
  Description of Artificial Sequence: Synthetic oligonucleotide
  modified_base (29)..(60): a, c, t, g, unknown or other
tcattactactgcaaagtagctgataacnnnnnnnnnnnnnnnnnnnnnnnnnnnnnnnnctttactgctgaataagtagataactac

SEQ ID NO: 5771 - protein, 10 aa, Unknown
  Description of Unknown: guaC peptide
KRTTFIRVRE

SEQ ID NO: 5772 - protein, 11 aa, Unknown
  Description of Unknown: yciA peptide
RFLAEPGDVNF

SEQ ID NO: 5773 - protein, 10 aa, Unknown
  Description of Unknown: rsmJ peptide
KKNRFDVYVK

SEQ ID NO: 5774 - DNA, 150 bp, Artificial Sequence
  Description of Artificial Sequence: Synthetic polynucleotide
agtgacctgccgcataggcagccaagaaaaatatcgtccgaagcaaggccagagtgggttggtgacctgccgcataggcagccaagattaggacaggaagaaaacacccaagttggggtctgttttctgccggaaaggcagtttttagtc

SEQ ID NO: 5775 - RNA, 20 nt, Artificial Sequence
  Description of Artificial Sequence: Synthetic oligonucleotide
aggucaggaagaaagcaacc

SEQ ID NO: 5776 - DNA, 91 bp, Photobacterium damselae
gtcaggtccggaaggaagcagccacagcaaatgacgtgtgtgccgggatgtggctggtggggcctccgcccgtttgtggttaaaaccaaaa

SEQ ID NO: 5777 - DNA, 145 bp, Artificial Sequence
  Description of Artificial Sequence: Synthetic polynucleotide
agtgtcctgccgcataggtagctaaaaatggctgttagatcgcagttagccacaatcgcccgtgtcctgccgcataggcagctaagaataggtcaggaagaaagcaacctacctgctgaacaagcagttaataatcaaaaccatt

SEQ ID NO: 5778 - RNA, 20 nt, Artificial Sequence
  Description of Artificial Sequence: Synthetic oligonucleotide
aggucuggaagaaaacaacc

SEQ ID NO: 5779 - DNA, 91 bp, Vibrio natriegens
gtcaggtccggaaggaagcagccgcagcgtgtgacttgtgtgccgggatgtggctggggtcccacccattgtgaagcctgcaatatatgtt

SEQ ID NO: 5780 - DNA, 145 bp, Artificial Sequence
  Description of Artificial Sequence: Synthetic polynucleotide
aggtatctgccgcataggcagtcaagaaaaggctaagtttcttatgttgctcaatttctttgtgatctgccgcataggcagctaagaataggtctggaagaaaacaacctacctgctgaacaagcagtttttattaaacccacta

SEQ ID NO: 5781 - DNA, 91 bp, Vibrio parahaemolyticus
gtcaggtccggaaggaagcagccgcagcgtgtgacttgtgtgccgggatgtggctggggtcccaccctttatgaagcctgcaatatatgtt

SEQ ID NO: 5782 - RNA, 32 nt, Artificial Sequence
  Description of Artificial Sequence: Synthetic oligonucleotide
auguuaaaaaaccacucaggaauaacaccaga

SEQ ID NO: 5783 - DNA, 91 bp, Vibrio azureus
gccatgtttaagaaatactcaggaatgacacctgaacagtataagaaccgtctactttagggttgtatggtggggtgctctgcgtttgtcg

SEQ ID NO: 5784 - protein, 19 aa, Vibrio azureus
AMFKKYSGMTPEQYKNRLL

SEQ ID NO: 5785 - DNA, 208 bp, Artificial Sequence
  Description of Artificial Sequence: Synthetic polynucleotide
actgtactgccgcataggtagctaagaaaagtgatcgattggcactatcatatgcagtttcctgtactgccgcataggtagctaagaaaatgacgatgctgataatgatagtcacattgaactgtactgccgcataggtagttaagagtatgttaaaaaaccactcaggaataacaccagaaaagactgccgaaaaggtagtttatac

SEQ ID NO: 5786 - DNA, 218 bp, Artificial Sequence
  Description of Artificial Sequence: Synthetic polynucleotide
actgtactgccgcataggtagctaagaaaagtgatcgattggcactatcatatgcagtttcctgtactgccgcataggtagctaagaaaatgacgatgctgataatgatagtcacattgaactgtactgccgcataggtagttaagagtatgttaaaaaaccactcaggaataacaccagaaaagactgccgaaaaggtagtttatacgatataaaaa

SEQ ID NO: 5787 - RNA, 22 nt, Artificial Sequence
  Description of Artificial Sequence: Synthetic oligonucleotide
auguuaaaaaaauacucaggua

SEQ ID NO: 5788 - DNA, 91 bp, Vibrio sp.
gcaatgtttaagaaatactccggcatgacaccggagcaatataagaatcgtttgttataactggtgtggcttgatatgtgcataataagtt

SEQ ID NO: 5789 - DNA, 148 bp, Artificial Sequence
  Description of Artificial Sequence: Synthetic polynucleotide
agtgatctgccgagtaggcagctaagaaaaatcacaacttttggctaacacacagcatcgggtgacctgccgagtaggcagctaagaaaatgttaaaaaaatactcaggtaaaaccctgccgaataggtagtttgaattttaccattt

SEQ ID NO: 5790 - DNA, 91 bp, Vibrio sp.
gcaatgtttaagaaatactccggcatgacaccggagcaatataagaatcgtttgttataactgatgtggctggtgtggctggaaccataag

SEQ ID NO: 5791 - DNA, 157 bp, Artificial Sequence
  Description of Artificial Sequence: Synthetic polynucleotide
agaatttatagtgacctgccgagtaggcagctaagaaatcggtgttttcttacccgcttagtaataggatgtgacctgccgagtaggcagctaagaaaatgttaaaaaaatactcaggtaaaaccctgccgaataggtagtttgaattttaccattt

SEQ ID NO: 5792 - DNA, 64 bp, Unknown
  Description of Unknown: AhdI C protein gene sequence
caaagtggctggtactcatagtccgtggacttatcgacatcattaagagtgtaattgacagatg

SEQ ID NO: 5793 - DNA, 81 bp, Artificial Sequence
  Description of Artificial Sequence: Synthetic oligonucleotide
tgttttttttgcggattatagtccgtggcaatgtttgcatcaagcgtagatagtttttcattttgtgattcgatttaaatg

SEQ ID NO: 5794 - DNA, 81 bp, Artificial Sequence
  Description of Artificial Sequence: Synthetic oligonucleotide
aaaaataaatgcggattatagtccgtggaaaagttctcttcaagaatagatagtctttctttttaatgtacttttgaaatg

SEQ ID NO: 5795 - DNA, 55 bp, Artificial Sequence
  Description of Artificial Sequence: Synthetic oligonucleotide
acccctaagtgaggattataatcctcattactactgcaaagtagctgataacaaa

SEQ ID NO: 5796 - DNA, 54 bp, Artificial Sequence
  Description of Artificial Sequence: Synthetic oligonucleotide
ggcattaaatgggggctataatcctcattactactaaaaagtagctgataacaa

SEQ ID NO: 5797 - DNA, 78 bp, Unknown
  Description of Unknown: Csp231I C protein gene sequence
acactaaggaaaacttagtaaaattgcttttttaaactaagaaaatcttagcaaaagtgtatggctgaggtttttatg

SEQ ID NO: 5798 - DNA, 84 bp, Artificial Sequence
  Description of Artificial Sequence: Synthetic oligonucleotide
aaactaagtattgcttagtacacttgttcgtataagactaagagaatcttagctacctgatcctcagctagcagagaccccatg

SEQ ID NO: 5799 - DNA, 84 bp, Artificial Sequence
  Description of Artificial Sequence: Synthetic oligonucleotide
aaacttaggattgctaagtatacaaaaatcagtaaaacttagacaatctaagttatctaaaggttgaaaagaaatgtgtaagtg

SEQ ID NO: 5800 - DNA, 49 bp, Artificial Sequence
  Description of Artificial Sequence: Synthetic oligonucleotide
atgtgctacacctaaaaactaagtaatatttagtttcggtgttcttatg

SEQ ID NO: 5801 - DNA, 51 bp, Artificial Sequence
  Description of Artificial Sequence: Synthetic oligonucleotide
ttaacggcaatactaaaacttagatactctaagttttagtggtggcatgtg

SEQ ID NO: 5802 - DNA, 28 bp, Aeromonas hydrophila
gtgaactgccgtataggcagccaagaaa

SEQ ID NO: 5803 - DNA, 28 bp, Aeromonas hydrophila
gtgaactgccgtataggcagccaagatt

SEQ ID NO: 5804 - DNA, 32 bp, Aeromonas hydrophila; identical to SEQ ID NO: 781

SEQ ID NO: 5805 - DNA, 36 bp, Aeromonas salmonicida; identical to SEQ ID NO: 5758

SEQ ID NO: 5806 - protein, 6 aa, Artificial Sequence
  Description of Artificial Sequence: 6xHis tag
HHHHHH

What is claimed is:

1. A recombinant RNA polynucleotide comprising contiguously in a 5′ to 3′ direction:
i) a 5′ end segment comprising a first CRISPR repeat sequence;
ii) a spacer sequence that comprises a targeting sequence that is complementary to a protospacer in a DNA target sequence; and
iii) a 3′ end segment comprising a second CRISPR repeat sequence;
wherein the 5′ end segment or the 3′ end segment comprises one or more nucleotide changes relative to a first reference repeat sequence, and wherein when contacted with type I—F3 CRISPR-Cas proteins, the recombinant RNA polynucleotide interacts with the type I—F3 CRISPR-Cas proteins to form a functional type I—F3 CRISPR-Cas complex that effects a modification in the DNA target sequence.

2. The recombinant RNA polynucleotide of claim 1 wherein the 3′ end segment or the 5′ end segment comprises one or more nucleotide changes relative to a second reference repeat sequence.

3. The recombinant RNA polynucleotide of claim 1, wherein the 5′ end segment and the 3′ end segment each comprises one or more nucleotide changes relative to the first and second reference repeat sequences, respectively.

4. The recombinant RNA polynucleotide of claim 1, wherein the type I—F3 CRISPR-Cas proteins comprise type I-F3b CRISPR-Cas proteins to form a functional type I-F3b CRISPR-Cas complex, and wherein the CRISPR repeat sequence optionally comprises three contiguous nucleotides at a 5′ end that are not GUG.

5. The recombinant RNA polynucleotide of claim 1, wherein the engineered guide polynucleotide exhibits more efficient modification of the DNA target sequence when contacted with the DNA target sequence along with a Type IF-3b CRISPR protein complex as compared to a control guide RNA that does not comprise the one or more nucleotide changes.

6. The recombinant RNA polynucleotide of claim 5, wherein the modification comprises insertion of a DNA cargo into the DNA target sequence.

7. The recombinant RNA polynucleotide of claim 5, wherein the 5′ end segment comprises or consists of 8 nucleotides, and/or wherein the 3′ end segment comprises or consists of 20 nucleotides, and wherein the 3′ end of the 20 nucleotides is a G.

8. The RNA polynucleotide of claim 5, wherein the 3′ end segment forms a stem loop, the stem loop comprising palindromic sequences.

9. The recombinant RNA polynucleotide claim 8, wherein the first reference repeat sequence is encoded by a first occurring repeat sequence that is 3′ to a Cas6 coding sequence in an endogenous prokaryotic CRISPR array, and/or wherein the second reference repeat sequence is encoded by a second occurring repeat sequence that is 3′ to the Cas6 coding sequence in the endogenous prokaryotic CRISPR array, and wherein the endogenous prokaryotic CRISPR array is optionally a gammaproteobacteria CRISPR array.

10. The recombinant RNA polynucleotide of claim 9, wherein the gammaproteobacteria CRISPR array comprises an A. salmonicida CRISPR array.

11. The recombinant RNA polynucleotide of any one of claims 1-10, wherein the RNA polynucleotide is present in a ribonucleoprotein complex.

12. The recombinant RNA polynucleotide of claim 11, wherein proteins in the ribonucleoprotein are selected from Cas5, Cas6, Cas7, Cas8, and combinations thereof.

13. The recombinant RNA polynucleotide of claim 12, wherein the ribonucleoprotein comprises the Cas6 and wherein a stem loop comprising at least a portion of the 3′ end segment is recognized by the Cas6 in the ribonucleoprotein complex.

14. The recombinant RNA polynucleotide of claim 11, wherein the targeting sequence is selected for inclusion in the RNA polynucleotide such that the RNA polynucleotide is suitable for use in CRISPR-based modification of a known DNA target sequence comprising the protospacer.

15. The recombinant RNA polynucleotide of claim 11, wherein the spacer is not more than 29 nucleotides in length.

16. The recombinant RNA polynucleotide of any one of claims 1-11, wherein the first and/or second reference repeat sequence is the same as a repeat sequence present in a bacterium or archaea, wherein the repeat sequence in the bacterium or archaea is contiguous with a spacer in a CRISPR array that is not the most recently acquired spacer acquired by the bacterium.

17. An expression vector encoding the engineered guide polynucleotide of any one of claims 1-11.

18. An isolated RNA polynucleotide transcribed from the expression vector of claim 17.

19. A cell comprising the expression vector of claim 17.

20. A system for modifying a genetic target in one or more cells, the system comprising a first set of transposon genes tnsA, tnsB, tnsC, and tniQ, Cas genes cas8f cas5f cas7f and cas6f and optionally an xre gene encoding a transcription regulator, or optionally one or more proteins encoded by one or more of said genes, and wherein optionally at least two of said proteins are within a fusion protein, and a sequence encoding the recombinant RNA polynucleotide of any one of claims 1-11, and optionally a DNA cargo that can be introduced into DNA in a location that is proximal to the protospacer.

21. The system of claim 20, wherein the tnsA gene comprises a change in sequence such that at least one amino acid in the TnsA protein encoded by the tnsA gene is changed relative to its wild type sequence, or if the protein is used the protein comprises said change.

22. The system of claim 20, wherein:
i) the tnsB gene comprises a change in sequence such that at least one amino acid in the TnsB protein encoded by the tnsB gene is changed relative to its wild type sequence or if the protein is used the protein comprises said change; or
ii) the tnsC gene comprises a change in sequence such that at least one amino acid in the TnsC protein encoded by the tnsC gene is changed relative to its wild type sequence or if the protein is used the protein comprises said change.

23. The system of claim 20, wherein:
a) the change in the TnsA protein comprises a change of Ala at position 125 of an Aeromonas salmonicida TnsA protein, wherein optionally the change is to an Asp, or is a homologous change in a homologous TnsA protein;
b) the change in the TnsB protein comprises a change of amino acid position 167 of an Aeromonas salmonicida TsnB protein, wherein optionally the change is to Ser, or is a homologous change in a homologous position of a homologous TnsB protein; or
c) the change in the TnsC protein comprises a change in at least one amino acid in position 135, 136, 137, 138, 139, or 140 of the Aeromonas salmonicida TnsC protein, wherein optionally the change is to an amino acid at position 140 in the TnsC protein, wherein optionally the change to amino acid 140 is a change to an Ala or Gln, or a is a homologous change in a homologous position of a homologous TnsC protein.

24. A method comprising expressing the recombinant RNA polynucleotide of any one of claims 1-11 in cells comprising first transposon genes tnsA, tnsB, tnsC, and optionally at least one tniQ, Cas genes cas8f cas5f cas7f, and cas6f, and optionally xre, wherein optionally at least one of the first set of transposon genes or the Cas genes are present within a recombinant polynucleotide.

25. The method of claim 24, wherein the targeting sequence is targeted to a protospacer in a chromosome or a plasmid in the cells.

26. The method of claim 24, wherein the cells are prokaryotic cells.

27. The method of claim 24, wherein the cells are eukaryotic cells and the targeting sequence targets the chromosome.

28. The method of claim 24, further comprising introducing a cargo DNA in the cells, wherein the DNA cargo is inserted into the chromosome or plasmid in a position that is proximal to the protospacer.

29. The method of claim 28, wherein the DNA cargo comprises transposon left and right ends.

30. The method of claim 29, wherein the DNA cargo is inserted into the chromosome or the plasmid at a position that is 48 nucleotides from an end of the protospacer.

31. A method comprising analyzing CRISPR arrays from a plurality of organisms, determining repeat sequences flanking spacers in the CRISPR arrays, comparing repeat sequences flanking earlier acquired spacers to repeat sequences flanking later acquired spacers, determining differences between repeat sequences flanking the earlier and later acquired spacers, and designating the repeat sequences flanking the earlier acquired spacers that are different from the repeat sequences flanking the later acquired spacers as candidates for use in designing a guide RNA for use in CRISPR-based DNA modification, wherein optionally the CRISPR-based modification is improved relative to a CRISPR-based DNA modification using a guide RNA that is transcribed from sequences flanking the later acquired spacers.

32. The method of claim 31, further comprising producing an RNA polynucleotide comprising 5′ end and/or 3′ end sequences that are transcribed from the repeat sequences flanking the earlier acquired repeat sequences.

33. The method of claim 32, further comprising using the RNA polynucleotide in a CRISPR-based DNA modification.

34. The method of claim 33, wherein the RNA polynucleotide comprises a substitution of a spacer in analyzed CRISPR arrays with a different spacer sequence that is targeted to a predetermined DNA sequence present in a chromosome or plasmid, and wherein said spacer is optionally not longer than 29 nucleotides in length.

35. An RNA polynucleotide produced according to the method of claim 31.

36. A library of expression vectors encoding RNA polynucleotides identified by the method of claim 31.

37. A database comprising a plurality of entries, the entries comprising or consisting of repeat sequences flanking earlier acquired spacers identified according to the method of claim 31.

38. A method comprising selecting one or more repeat sequences from the database of claim 37, and producing an expression vector encoding the one or more repeat sequences.

39. A kit for producing an expression vector for use in CRISPR-based DNA modification, the kit comprising a vector comprising one or more restriction endonuclease recognition sites configured for cloning a desired spacer such that the spacer is contiguous with one or more repeat sequences identified according to the method of claim 31.

40. The kit of claim 39, further comprising one or more expression vectors encoding a first set of transposon genes tnsA, tnsB, tnsC, and tniQ, Cas genes cas8f, cas5f cas7f, and cas6f and optionally an xre gene, or optionally one or more proteins encoded by one or more of said genes.

41. A method for modifying a DNA target sequence, the method comprising contacting the DNA target sequence with
i) a guide polynucleotide comprising a spacer sequence and a CRISPR repeat sequence, and
ii) a type I-F CRISPR-Cas protein,
wherein the spacer sequence comprises a targeting sequence that is complementary to a protospacer sequence the DNA target sequence, wherein the CRISPR repeat sequence comprises a nucleotide change relative to a reference repeat sequence, and wherein guide polynucleotide directs the type I-F CRISPR-Cas protein to effect a modification in the DNA target sequence.

42. The method of claim 41, wherein the guide polynucleotide further comprises a second CRISPR repeat sequence, wherein the second CRISPR repeat sequence comprises a nucleotide change relative to a second reference repeat sequence.

43. The method of claim 41 or 42, wherein the first reference repeat sequence is encoded by a first occurring repeat sequence that is 3′ to a Cas6 coding sequence in an endogenous prokaryotic CRISPR array, and/or wherein the second reference repeat sequence is encoded by a second occurring repeat sequence that is 3′ to the Cas6 coding sequence in the endogenous prokaryotic CRISPR array, and wherein the endogenous prokaryotic CRISPR array is optionally a gammaproteobacteria CRISPR array.

44. The method of any one of claims 41-43, wherein the CRISPR repeat sequence comprises three contiguous nucleotides at a 5′ end that are not GTG or GUG.

45. The method of any one of claims 41-44, wherein the modification is more efficient as compared to a modification induced by the type I-F CRISPR-Cas protein and a reference guide RNA that comprises the first or second reference repeat sequence and does not comprise the nucleotide change.

46. The method of any one of claims 41-45, wherein the type I-F CRISPR-Cas protein comprises Cas8, Cas5, Cas7, or Cas6.

47. The method of claim 46, comprising contacting the DNA target sequence with Cas8, Cas5, Cas7 and Cas6.

48. The method of claim 47, wherein two or more of the Cas8, Cas5, Cas7 and Cas6 proteins are connected by a linker.

49. The method of any one of claims 41-48, further comprising contacting the DNA target sequence with a transposon protein selected from the group consisting of tnsA, tnsB, tnsC, tniQ, and tnsD.

50. The method of claim 49, wherein the TnsA protein comprises a A125D amino acid substitution as referenced in the TnsA reference sequence.

51. The method of claim 49, wherein the TnsB protein comprises a P167S amino acid substitution as referenced in the TnsB reference sequence.

52. The method of claim 49, wherein the TnsC protein comprises a L135, I136, I137, I138, D139, E140A or E140Q amino acid substation in the TnsC reference sequence.

53. The method of any one of claims 41-52, wherein the modification comprises inserting a DNA cargo into the DNA target sequence.

54. The method of claim 53, wherein the modification does not result in a double stranded break in the DNA target sequence.

55. The method of claim 53 or, wherein the DNA target sequence is in a eukaryotic chromosome.

56. The method of any one of claims 41-55, wherein the DNA target sequence is in a cell.

57. The method of claim 56, wherein the cell is a mammalian cell, optionally wherein the cell is a human cell.

58. The method of any one of claims 52-57, wherein the DNA target sequence is in a subject.

59. The method of claim 58, wherein the subject has a disease, and wherein the DNA cargo comprises a DNA sequence that encodes a protein, wherein expression of the protein in the subject treats or ameliorates the disease.

60. A method for treatment of a disease in a subject in need thereof, the method comprising administering the engineered polynucleotide of any one of claims 1-11, the vector of claim 17, the cell of claim 19, or the system of any one of claims 20-23 to the subject, wherein the modification treats or ameliorates a symptom of the disease in the subject.
